(19) United States
(12) Patent Application Publication
(10) Pub. No.: US 2008/0044896 A1
(43) Pub. Date: Feb. 21, 2008

(54) Novel human secreted proteins and polynucleotides encoding the same

(76) Inventors: Gregory Donoho, Indianapolis, IN (US); Carl Johan Friddle, The Woodlands, TX (US); Glenn Friedrich, Houston, TX (US); Erin Hilbun, Denton, TX (US); Yi Hu, Spring, TX (US); Brian Mathur, Nashville, TN (US); Maricar Miranda, The Woodlands, TX (US); Michael C. Nehls, Stockdorf (DE); Nghi D. Nguyen, Sugar Land, TX (US); Arthur T. Sands, The Woodlands, TX (US); John Scoville, Pearland, TX (US); C. Alexander Turner JR., The Woodlands, TX (US); D. Wade Walke, Spring, TX (US); Xiaoming Wang, Burr Ridge, IL (US); Frank Wattler, Muensing (DE); Nathaniel L. Wilganowski, Spring, TX (US); Qiongshu Xie, Needham, MA (US); Xuanchuan Yu, Conroe, TX (US); Brian Zambrowicz, The Woodlands, TX (US)

Correspondence Address: LEXICON PHARMACEUTICALS, INC., 8800 TECHNOLOGY FOREST PLACE, THE WOODLANDS, TX, 77381-1160, US

(21) Appl. No.: 11/354,210

(22) Filed: Feb. 13, 2006

Related U.S. Application Data
(63) Continuation-in-part of application No. 10/901,801, filed on Jul. 29, 2004, now abandoned.
Application No. 10/901,801 is a continuation of application No. 09/667,380, filed on Sep. 22, 2000, now abandoned.
(63) Continuation-in-part of application No. 09/689,911, filed on Oct. 11, 2000, now abandoned.
(63) Continuation-in-part of application No. 10/999,215, filed on Nov. 29, 2004, now abandoned.
Application No. 10/999,215 is a continuation of application No. 09/691,343, filed on Oct. 18, 2000, now abandoned.
(63) Continuation-in-part of application No. 11/285,738, filed on Nov. 22, 2005, now abandoned.
Application No. 11/285,738 is a continuation of application No. 09/714,883, filed on Nov. 16, 2000, now abandoned.
(63) Continuation-in-part of application No. 09/863,823, filed on May 23, 2001.
(63) Continuation-in-part of application No. 11/039,362, filed on Jan. 19, 2005.
Application No. 11/039,362 is a continuation of application No. 09/898,456, filed on Jul. 3, 2001, now abandoned.
(63) Continuation-in-part of application No. 09/899,514, filed on Jul. 5, 2001, now abandoned.
(63) Continuation-in-part of application No. 10/972,984, filed on Oct. 25, 2004, now abandoned.
Application No. 10/972,984 is a continuation of application No. 09/952,474, filed on Sep. 12, 2001, now abandoned.
(63) Continuation-in-part of application No. 11/049,637, filed on Feb. 2, 2005, now abandoned.
Application No. 11/049,637 is a continuation of application No. 09/953,096, filed on Sep. 14, 2001, now Pat. No. 6,867,291.
(63) Continuation-in-part of application No. 11/012,588, filed on Dec. 15, 2004, now abandoned.
Application No. 11/012,588 is a continuation of application No. 09/957,832, filed on Sep. 21, 2001, now abandoned.
(63) Continuation-in-part of application No. 10/901,803, filed on Jul. 29, 2004, now abandoned.
Application No. 10/901,803 is a continuation of application No. 09/962,740, filed on Sep. 25, 2001, now abandoned.
(63) Continuation-in-part of application No. 11/011,961, filed on Dec. 14, 2004, now abandoned.
Application No. 11/011,961 is a continuation of application No. 09/977,053, filed on Oct. 12, 2001, now abandoned.
(63) Continuation-in-part of application No. 10/859,018, filed on Jun. 1, 2004, now abandoned.
Application No. 10/859,018 is a continuation of application No. 10/038,288, filed on Nov. 9, 2001, now abandoned.
(63) Continuation-in-part of application No. 11/260,694, filed on Oct. 27, 2005, now abandoned.
Application No. 11/260,694 is a continuation of application No. 09/997,191, filed on Nov. 20, 2001, now abandoned.
(63) Continuation-in-part of application No. 11/039,397, filed on Jan. 20, 2005, now abandoned.
Application No. 11/039,397 is a continuation of application No. 10/154,675, filed on May 23, 2002, now abandoned.
(63) Continuation-in-part of application No. 11/149,003, filed on Jun. 9, 2005.
Application No. 11/149,003 is a continuation of application No. 10/189,971, filed on Jul. 3, 2002, now abandoned.
(63) Continuation-in-part of application No. 10/958,858, filed on Oct. 5, 2004, now abandoned.
Application No. 10/958,858 is a continuation of application No. 10/219,449, filed on Aug. 14, 2002, now abandoned.
(63) Continuation-in-part of application No. 11/022,296, filed on Dec. 23, 2004, now abandoned.
Application No. 11/022,296 is a continuation of application No. 10/843,131, filed on May 11, 2004, now Pat. No. 6,852,840.
Application No. 10/843,131 is a division of application No. 10/246,658, filed on Sep. 18, 2002, now Pat. No. 6,790,660.
(60) Provisional application No. 60/156,101, filed on Sep. 24, 1999.
(60) Provisional application No. 60/158,848, filed on Oct. 12, 1999.
(60) Provisional application No. 60/160,106, filed on Oct. 18, 1999.
(60) Provisional application No. 60/162,547, filed on Oct. 29, 1999.
(60) Provisional application No. 60/166,429, filed on Nov. 19, 1999.
(60) Provisional application No. 60/206,414, filed on May 23, 2000.
(60) Provisional application No. 60/216,384, filed on Jul. 7, 2000.
(60) Provisional application No. 60/219,890, filed on Jul. 21, 2000.
(60) Provisional application No. 60/230,609, filed on Sep. 6, 2000.
(60) Provisional application No. 60/218,461, filed on Jul. 14, 2000.
(60) Provisional application No. 60/232,283, filed on Sep. 13, 2000.
(60) Provisional application No. 60/232,793, filed on Sep. 15, 2000.
(60) Provisional application No. 60/234,100, filed on Sep. 21, 2000.
(60) Provisional application No. 60/235,744, filed on Sep. 27, 2000.
(60) Provisional application No. 60/241,195, filed on Oct. 17, 2000.
(60) Provisional application No. 60/240,466, filed on Oct. 13, 2000.
(60) Provisional application No. 60/249,044, filed on Nov. 15, 2000.
(60) Provisional application No. 60/252,361, filed on Nov. 21, 2000.
(60) Provisional application No. 60/293,709, filed on May 25, 2001.
(60) Provisional application No. 60/303,748, filed on Jul. 6, 2001.
(60) Provisional application No. 60/302,949, filed on Jul. 3, 2001.
(60) Provisional application No. 60/315,634, filed on Aug. 29, 2001.
(60) Provisional application No. 60/312,300, filed on Aug. 14, 2001.
(60) Provisional application No. 60/323,068, filed on Sep. 18, 2001.

(51) Int. Cl. C07H 21/04; C07K 16/00; C12N 15/00

(52) U.S. Cl. 435/320.1; 530/324; 536/23.5

(57) ABSTRACT

Novel human polynucleotide and polypeptide sequences are disclosed that can be used in therapeutic, diagnostic, and pharmacogenomic applications.

### 1.0 CROSS-REFERENCE TO RELATED APPLICATIONS

[0001] The present application is a continuation-in-part of: co-pending U.S. application Ser. No. 10/901,801, filed on Jul. 29, 2004, which is a continuation of U.S. application Ser. No. 09/667,380, filed on Sep. 22, 2000, abandoned, which claims the benefit of U.S. Provisional Application No. 60/156,101, filed on Sep. 24, 1999; co-pending U.S. application Ser. No. 09/689,911, filed on Oct. 11, 2000, which claims the benefit of U.S. Provisional Application No. 60/158,848, filed on Oct. 12, 1999; co-pending U.S. application Ser. No. 10/999,215, filed on Nov. 29, 2004, which is a continuation of U.S. application Ser. No. 09/691,343, filed on Oct. 18, 2000, abandoned, which claims the benefit of U.S. Provisional Application Nos. 60/162,547, filed on Oct. 29, 1999, and 60/160,106, filed on Oct. 18, 1999; co-pending U.S. application Ser. No. 11/285,738, filed on Nov. 22, 2005, which is a continuation of U.S. application Ser. No. 09/714,883, filed on Nov. 16, 2000, abandoned, which claims the benefit of U.S. Provisional Application No. 60/166,429, filed on Nov. 19, 1999; co-pending U.S. application Ser. No. 09/863,823, filed on May 23, 2001, which claims the benefit of U.S. Provisional Application No. 60/206,414, filed on May 23, 2000; co-pending U.S. application Ser. No. 11/039,362, filed on Jan. 19, 2005, which is a continuation of U.S. application Ser. No. 09/898,456, filed on Jul. 3, 2001, abandoned, which claims the benefit of U.S. Provisional Application Nos. 60/230,609, filed on Sep. 6, 2000, 60/219,890, filed on Jul. 21, 2000, and 60/216,384, filed on Jul. 7, 2000; co-pending U.S. application Ser. No. 09/899,514, filed on Jul. 5, 2001, which claims the benefit of U.S. Provisional Application No. 60/218,461, filed on Jul. 14, 2000; co-pending U.S. application Ser. No. 10/972,984, filed on Oct. 25, 2004, which is a continuation of U.S. application Ser. No. 09/952,474, filed on Sep. 12, 2001, abandoned, which claims the benefit of U.S. Provisional Application No. 60/232,283, filed on Sep. 13, 2000; co-pending U.S. application Ser. No. 11/049,637, filed on Feb. 2, 2005, which is a continuation of U.S. application Ser. No. 09/953,096, filed on Sep. 14, 2001, which issued as U.S. Pat. No. 6,867,291 B1 on Mar. 15, 2005, which claims the benefit of U.S. Provisional Application No. 60/232,793, filed on Sep. 15, 2000; co-pending U.S. application Ser. No. 11/012,588, filed on Dec. 15, 2004, which is a continuation of U.S. application Ser. No. 09/957,832, filed on Sep. 21, 2001, abandoned, which claims the benefit of U.S. Provisional Application No. 60/234,100, filed on Sep. 21, 2000; co-pending U.S. application Ser. No. 10/901,803, filed on Jul. 29, 2004, which is a continuation of U.S. application Ser. No. 09/962,740, filed on Sep. 25, 2001, abandoned, which claims the benefit of U.S. Provisional Application Nos. 60/241,195, filed on Oct. 17, 2000, and 60/235,744, filed on Sep. 27, 2000; co-pending U.S. application Ser. No. 11/011,961, filed on Dec. 14, 2004, which is a continuation of U.S. application Ser. No. 09/977,053, filed on Oct. 12, 2001, abandoned, which claims the benefit of U.S. Provisional Application No. 60/240,466, filed on Oct. 13, 2000; co-pending U.S. application Ser. No. 10/859,018, filed on Jun. 1, 2004, which is a continuation of U.S. application Ser. No. 10/038,288, filed on Nov. 9, 2001, abandoned, which claims the benefit of U.S. Provisional Application No. 60/249,044, filed on Nov. 15, 2000; co-pending U.S. application Ser. No. 11/260,694, filed on Oct. 27, 2005, which is a continuation of U.S. application Ser. No. 09/997,191, filed on Nov. 20, 2001, abandoned, which claims the benefit of U.S. Provisional Application No. 60/252,361, filed on Nov. 21, 2000; co-pending U.S. application Ser. No. 11/039,397, filed on Jan. 20, 2005, which is a continuation of U.S. application Ser. No. 10/154,675, filed on May 23, 2002, abandoned, which claims the benefit of U.S. Provisional Application Nos. 60/303,748, filed on Jul. 6, 2001, and 60/293,709, filed on May 23, 2001; co-pending U.S. application Ser. No. 11/149,003, filed on Jun. 9, 2005, which is a continuation of U.S. application Ser. No. 10/189,971, filed on Jul. 3, 2002, abandoned, which claims the benefit of U.S. Provisional Application Nos. 60/315,634, filed on Aug. 29, 2001, and 60/302,949, filed on Jul. 3, 2001; co-pending U.S. application Ser. No. 10/958,858, filed on Oct. 5, 2004, which is a continuation of U.S. application Ser. No. 10/219,449, filed on Aug. 14, 2002, abandoned, which claims the benefit of U.S. Provisional Application No. 60/312,300, filed on Aug. 14, 2001; and co-pending U.S. application Ser. No. 11/022,296, filed on Dec. 23, 2004, which is a continuation of U.S. application Ser. No. 10/843,131, filed on May 11, 2004, which issued as U.S. Pat. No. 6,852,840 B2 on Feb. 8, 2005, which is a divisional of U.S. application Ser. No. 10/246,658, filed on Sep. 18, 2002, which issued as U.S. Pat. No. 6,790,660 B1 on Sep. 14, 2004, which claims the benefit of U.S. Provisional Application No. 60/323,068, filed on Sep. 18, 2001; each of which is herein incorporated by reference in its entirety.

### 2.0 CROSS-REFERENCE TO SEQUENCE LISTING SUBMITTED ON COMPACT DISC

[0002] The present application contains a Sequence Listing of SEQ ID NOS:1-136, in file “FINALseqlist.TXT” (1,101,824 bytes), created on Feb. 10, 2006, submitted herewith on duplicate compact disc (Copy 1 and Copy 2), which is herein incorporated by reference in its entirety.

### 3.0 INTRODUCTION

[0003] The present invention relates to the discovery, identification, and characterization of novel human polynucleotides encoding proteins sharing sequence similarity with mammalian trypsin inhibitors, mammalian galanins, animal chordins, animal proteins that contain CUB domains, mammalian ceruloplasmins, animal proteins that contain an Ig-like domain, mammalian Wnt and Wnt-family proteins, mammalian cartilage matrix and von Willebrand factor proteins, mammalian netrin proteins, human hemicentin proteins, animal mucoid inhibitor proteins, mammalian cell adhesion proteins, human protein hormones, mammalian EGF-family proteins, animal collagen proteins, and animal kielin proteins. The invention encompasses the described polynucleotides, host cell expression systems, the encoded proteins, fusion proteins, polypeptides and peptides, antibodies to the encoded proteins and peptides, and genetically engineered animals that either lack or overexpress the disclosed polynucleotides, antagonists and agonists of the proteins, and other compounds that modulate the expression or activity of the proteins encoded by the disclosed polynucleotides, which can be used for diagnosis, drug screening, clinical trial monitoring, the treatment of physiological, behavioral, and/or infectious diseases and disorders, and cosmetic or nutriceutical applications.

### 4.0 BACKGROUND OF THE INVENTION

[0004] In addition to providing the structural and mechanical scaffolding for cells and tissues, proteins can also serve as recognition markers, ligands/receptors, mediate signal transduction and growth, mediate adhesion, and can mediate or facilitate the passage of materials across the lipid bilayer. Proteins are integral components of the various systems used by the body to monitor and regulate different bodily functions. Proteins present in the kidney and colon can mediate or modulate water resorption and blood volume in the body. In particular, secreted proteins, or circulating fragments or portions of other proteins, are often involved in regulating and maintaining a wide variety of biological and physiological processes. Often, such processes are mediated by protein ligands that interact with corresponding membrane receptor proteins that activate signal transduction and other pathways that control cell physiology, chemical release and communication, and gene expression.

[0005] Proteases are enzymes that mediate the proteolytic cleavage of polypeptide sequences. Conversely, protease inhibitors prevent or hinder proteolytic activity. Given the importance of proteolysis in a wide variety of cellular functions and disease, protease inhibitors have been demonstrated to be involved in, inter alia, regulating development, modulating cellular processes, and preventing infectious, and particularly viral, disease.

[0006] Galanins are biologically active peptides that are present in the central and peripheral nervous system and are upregulated after spinal injury and in response to estrogen. Galanins also include neuropeptides that control a broad variety of biological activities such as, for example, the release of growth hormone, inhibition of insulin and somatostatin release, smooth muscle contraction in the gastrointestinal and genitourinary tracts, and adrenal secretion. Galanins are typically cleaved from longer precursor proteins and are about 29-30 amino acids in length. The first 14 residues of mature galanin proteins are highly conserved. Galanins have been associated with, inter alia, regulating body weight, modulating behavior, treating pain, inflammation, neuronal repair, Alzheimer's dementia, inflammatory bowel disorders, and infectious disease.

[0007] Ceruloplasmins are members of a family of metal chelating proteins. Ceruloplasmins have been associated with development, ferroxidase activity, amine oxidase activity, copper transport, homeostasis, and superoxide dismutase activity. Wnt and Wnt-family proteins are soluble secreted growth and signaling proteins that have been implicated in a number of biological processes and anomalies, such as blood cell formation, cancer, homeostasis, development (i.e., intercellular signaling during vertebrate (especially spinal cord) development), weight regulation, and inflammation.

[0008] Von Willebrand proteins are secreted proteins that have been implicated in cartilage formation and development and platelet binding to circulatory endothelium. Netrins are secreted proteins that have been implicated in a number of biological processes and anomalies such as neural development, paralysis, and axon guidance. Kielins are secreted proteins that have been implicated in a number of biological processes and anomalies such as development and signal transduction. Collagens are a family of proteins that are among the most abundant proteins in the body. Biosynthetically produced collagens find medical utility in prosthetic and cosmetic applications.

[0009] Therefore, secreted proteins constitute ideal targets for drug intervention and for the design of therapeutic agents.

### 5.0 SUMMARY OF THE INVENTION

[0010] The present invention relates to the discovery, identification, and characterization of nucleotides that encode novel human secreted proteins, and the corresponding amino acid sequences of these proteins. The novel human secreted proteins, described for the first time herein, share structural similarity with: animal trypsin inhibitor proteins, cancer pathogenesis proteins, sperm glycoproteins, and secretory proteins (SEQ ID NOS:1-3); animal galanins (SEQ ID NOS:4-7; unlike other known galanins, the presently described sequences differ at amino acid 14 of the consensus sequence shared by other galanins, replacing a histidine residue in the consensus with a valine residue at position 46 of SEQ ID NOS:5 and 7); animal chordins, NEL protein, and thrombospondin (SEQ ID NOS:8-12); animal proteins that contain CUB domains (SEQ ID NOS:13 and 14); animal ceruloplasmins (SEQ ID NOS:15 and 16); eukaryotic membrane and secreted proteins, including, but not limited to, neural cell adhesion molecules (NCAMs), via the Ig-like domain, tyrosine kinase receptors, and vascular endothelial growth factor (VEGF) receptors (SEQ ID NOS:17-25); animal Wnt proteins, particularly Wnt-3A (SEQ ID NOS:26-30) and Wnt-8D (SEQ ID NOS:31-49); animal cartilage matrix proteins and von Willebrand proteins (SEQ ID NOS:50-52); animal netrin, laminin, agrin, and attractin proteins (SEQ ID NOS:53-57); mammalian hemicentin, titin, basement membrane, semaphorin, fibulin, and cell adhesion proteins (SEQ ID NOS:58-61); animal protease inhibitors, serine protease inhibitors, follistatin, and ovomucoid inhibitors (SEQ ID NOS:62-66); animal protease inhibitors, antithrombin, serine protease inhibitors, plasminogen activator inhibitor, serpins, neurite promoting-factor, and nexins (SEQ ID NOS:67-71); mammalian cell adhesion proteins, selectins, and a variety of cell surface markers and receptors (SEQ ID NOS:72-78); animal Wnt-family proteins, disintegrins, and metalloproteinases (SEQ ID NOS:79-83); human protein hormones chorionic gonadotrophin and follicle stimulating hormone (SEQ ID NOS:84-86); animal Wnt-family proteins, in particular the human ortholog of chicken Wnt-14 (SEQ ID NOS:87-89); mammalian proteins of the epidermal growth factor (EGF) superfamily and notch proteins (SEQ ID NOS:90-103); animal kielin and chordin proteins (SEQ ID NOS:104-128); animal collagens, including, but not limited to, the human collagen alpha 2 (VIII) chain (SEQ ID NOS:129-132); and animal kielin, zonadhesin, and chordin proteins (note the high cysteine content) (SEQ ID NOS:133-136).

[0011] Galanins are typically produced as longer precursor proteins that are subsequently cleaved (at one or both ends) into their mature or active form. The galanin-like consensus sequence begins at amino acid number 33 of SEQ ID NOS:5 and 7, and this position will generally define the amino terminus of the mature form of the disclosed galanin-like sequences. Galanins are typically about 29-30 amino acids in length. Accordingly, an additional aspect of the present invention includes peptides having an N-terminus beginning at amino acid position 33 of SEQ ID NOS:5 or 7, extending at least about 14 amino acids in length, and having a carboxy-terminus at any amino acid position disclosed in the Sequence Listing, and the polynucleotide sequences encoding the same.

[0012] As neuropeptides, galanins have been subject to intense scientific scrutiny. For examples of how the described galanin-like proteins, or their (G-protein coupled) receptors, can be produced, antagonized, processed, applied, and delivered, see, for example, U.S. Pat. Nos. 5,576,296 and 5,756,460, U.S. Provisional Patent Application Ser. No. 60/033,851, and U.S. patent application Ser. No. 08/721,837. Given their structural relatedness to galanins, the described galanin-like sequences are suitable for use and modification as contemplated for other galanins.

[0013] With regard to SEQ ID NOS:8-14, upon secretion these proteins typically exert physiological effect by interacting with receptors to produce a biological effect (such as, for example, signal transduction). Consequently, interfering with the binding of these proteins to their cognate receptors effect processes mediated by these proteins, while enhancing the concentration of these proteins in vivo can boost the effects/activity levels of such processes. Yet another alternative is that these proteins, or portions thereof, can act as hormones (or peptide hormones), enzymes, or receptor/ligand antagonists, and used accordingly. As such, these proteins have been the subject of intense scientific and commercial scrutiny (see, e.g., PCT Patent Application Serial Nos. PCT/US98/04858, filed Mar. 12, 1998, and PCT/US98/05255, filed Mar. 18, 1998, U.S. Patent Application Serial No. 09/040,963, filed Mar. 18, 1998, and U.S. Provisional Patent Application Nos. 60/068,368, filed Dec. 19, 1997, 60/057,765, filed Sep. 5, 1997, 60/048,970, filed Jun. 6, 1997, 60/040,762, filed Mar. 14, 1997, and 60/041,263, filed Mar. 19, 1997.

[0014] With respect to SEQ ID NOS:8-12, chordins are developmentally active proteins that are antagonists of bone morphogenic protein-4 (BMP-4), and serve as targets for proteolytic cleavage by BMP-1. Chordin has been implicated in developmental regulation during gastrulation and skeletogenesis. The regions of SEQ ID NOS:9 and 11 that constitute the chordin-like domains also display marked similarity with human NEL protein and animal thrombospondins. In addition to development, these proteins have been associated with biological activities such as, for example, the inhibition of angiogenesis, clotting, and adrenal secretion.

[0015] With respect to SEQ ID NOS:13 and 14, the CUB domain is an extracellular domain (ECD) present in variety of diverse proteins, such as BMP-1, proteinases, spermadhesins, complement subcomponents, and neuronal recognition molecules. SEQ ID NO:14 also displays significant similarity with bone morphogenic protein, neuropilin, C-proteinases and endopeptidases, human NP-2, semaphorin, bovine acidic seminal fluid protein, and vascular endothelial growth factor. Thus, SEQ ID NO:14 represents a new member of the platelet-derived growth factor/VEGF family of proteins.

[0016] With respect to SEQ ID NOS:15 and 16, as ceruloplasmins are metal chelating proteins involved in copper transport, ceruloplasmins have been implicated in conditions including, but not limited to, Wilson's Disease.

[0017] As secreted growth factors, Wnt-family proteins have been subject to considerable scrutiny, as evidenced by U.S. Pat. Nos. 5,824,789, 6,043,053, and 5,780,291, which describe a variety of assays and applications that are applicable to the presently described Wnt-family proteins.

[0018] SEQ ID NOS:90-103 can be used in drug screening assays similar to those described in, for example, U.S. Pat. No. 6,048,850, in order to identify compounds for treating diseases such as, for example, immune disorders, Alzheimer's disease, epilepsy, and Parkinson's disease.

[0019] Given the physiological importance of collagen proteins, they have been subject to intense scrutiny as exemplified and discussed in U.S. Pat. Nos. 5,925,736 and 5,807,581, which describe a variety of uses and applications applicable to the presently described collagen proteins.

[0020] The novel human nucleic acid sequence described herein encode alternative proteins/open reading frames (ORFs) of 497, 141, 116, 451, 429, 305, 996, 254, 210, 262, 218, 423, 352, 369, 351, 255, 34, 23, 36, 351, 34, 36, 449, 288, 261, 5518, 4126, 86, 70, 404, 362, 1107, 3571, 1842, 433, 363, 84, 365, 995, 1130, 709, 844, 790, 925, 955, 1628, 1593, 1057, 1477, 1512, 1570, 1535, 1251, 1192, 1207, 759, 1342, 717, 703, 685, and 627 amino acids in length (see SEQ ID NOS:2, 5, 7, 9, 11, 14, 16, 18, 20, 22, 24, 27, 29, 32, 34, 36, 38, 40, 42, 44, 46, 48, 51, 54, 56, 59, 61, 63, 65, 68, 70, 73, 75, 77, 80, 82, 85, 88, 91, 93, 95, 97, 99, 101, 103, 105, 107, 109, 111, 113, 115, 117, 119, 121, 123, 125, 127, 130, 132, 134, and 136, respectively). SEQ ID NOS:3, 12, 25, 30, 49, 52, 57, 66, 71, 78, 83, 86, 89, and 128 describe full length ORFs, as well as flanking 5′ and 3′ sequences.

[0021] The invention also encompasses agonists and antagonists of the described secreted proteins, including small molecules, large molecules, mutant versions of the described secreted proteins, or portions thereof, that compete with native secreted proteins, peptides, antibodies, nucleotide sequences that can be used to inhibit (e.g., antisense and ribozyme molecules, and open reading frame or regulatory sequence replacement constructs) or enhance (e.g., expression constructs that place the described polynucleotides under the control of a strong promoter system) the expression of the described secreted proteins, and transgenic animals that express the described secreted protein sequences, or “knock-outs” (which can be conditional) that do not express functional versions of the described secreted proteins. Knock-out mice can be produced in several ways, one of which involves the use of mouse embryonic stem cell lines that contain gene trap mutations in a murine homolog of at least one of the described secreted protein sequences. When the unique secreted protein sequences described in SEQ ID NOS:1-136 are “knocked-out” they provide a method of identifying phenotypic expression of the particular gene, as well as a method of assigning function to previously unknown genes. In addition, animals in which the unique secreted protein sequences described in SEQ ID NOS:1-136 are “knocked-out” provide an unique source in which to elicit antibodies to homologous and orthologous proteins, which would have been previously viewed by the immune system as “self” and therefore would have failed to elicit significant antibody responses.

[0022] Additionally, the unique secreted protein sequences described in SEQ ID NOS:1-136 are useful for the identification of protein coding sequences, and mapping an unique gene to a particular chromosome. These sequences identify biologically verified exon splice junctions, as opposed to splice junctions that may have been bioinformatically predicted from genomic sequence alone. The sequences of the present invention are also useful as additional DNA markers for restriction fragment length polymorphism (RFLP) analysis, and in forensic biology, particularly given the presence of nucleotide polymorphisms within the described sequences.

[0023] Further, the present invention also relates to processes for identifying compounds that modulate, i.e., act as agonists or antagonists of, expression and/or activity of the described secreted protein sequences that utilize purified preparations of the described secreted protein nucleotide and/or polypeptide products, or cells expressing the same. Such compounds can be used as therapeutic agents for the treatment of any of a wide variety of symptoms associated with biological disorders or imbalances.

### 6.0 BRIEF DESCRIPTION OF THE FIGURES

[0024] No Figures are required in the present invention.

### 7.0 DETAILED DESCRIPTION OF THE INVENTION

[0025] The human secreted proteins described for the first time herein are novel proteins that are apparently expressed in, inter alia, human cell lines and: human prostate, fetal brain, cerebellum, spinal cord, thymus, spleen, lymph node, bone marrow, trachea, lung, kidney, fetal liver, thyroid, adrenal gland, stomach, small intestine, colon, muscle, heart, uterus, placenta, mammary gland, and testis cells (SEQ ID NOS:1-3); human cervix cells (SEQ ID NOS:8-14); human testis and mammary gland cells (SEQ ID NOS:15 and 16); human kidney, colon, and rectum cells (SEQ ID NOS:17-25); human adipose, esophagus, cervix, prostate, testis, and pericardium cells (SEQ ID NOS:26-30); human pituitary gland, cerebellum, spleen, adrenal gland, small intestine, skeletal muscle, heart, uterus, adipose, esophagus, cervix, rectum, pericardium, fetal kidney, and fetal lung cells (SEQ ID NOS:31-49); human uterus, adipose, esophagus, cervix, brain, prostate, trachea, thyroid, spleen, and rectum cells (SEQ ID NOS:50-52); human lymph node, testis, heart, mammary gland, adipose, esophagus, cervix, pericardium, fetal kidney, fetal lung, 6-, 9-, and 12-wk embryo, brain, pituitary, spleen, activated T cells, skeletal muscle, and fetal brain cells (SEQ ID NOS:53-57); human fetal brain, spinal cord, thymus, pituitary, lymph node, trachea, kidney, liver, prostate, testis, stomach, small intestine, skeletal muscle, adrenal gland, heart, uterus, mammary gland, adipose, skin, esophagus, bladder, cervix, rectum, pericardium, and ovary cells (SEQ ID NOS:58-61); human thymus and testis cells (SEQ ID NOS:62-66); human fetal brain, spinal cord, spleen, testis, and adipose cells (SEQ ID NOS:67-71); human cerebellum, pituitary gland, bone marrow, testis, adrenal gland, small intestine, heart, uterus, placenta, mammary gland, adipose, esophagus, cervix, rectum, pericardium, fetal kidney, and fetal lung cells (SEQ ID NOS:72-78); human brain, pituitary, cerebellum, thymus, spleen, lymph node, kidney, fetal liver, prostate, testis, thyroid, adrenal gland, salivary gland, stomach, small intestine, colon, skeletal muscle, heart, uterus, placenta, mammary gland, adipose, esophagus, bladder, cervix, rectum, pericardium, hypothalamus, ovary, fetal kidney, and fetal lung cells (SEQ ID NOS:79-83); human fetal brain, spinal cord, thymus, lymph node, lung, kidney, testis, adrenal gland, bone marrow, stomach, small intestine, colon, uterus, placenta, mammary gland, bladder, hypothalamus, fetal kidney, fetal lung, gall bladder, aorta, osteosarcoma, 6-, 9-, and 12-week embryo, embryonic carcinoma, and microvascular endothelium cells (SEQ ID NOS:84-86); human fetal tissue and testis cells (SEQ ID NOS:87-89); human brain, hypothalamus, lymph node, fetal kidney, fetal lung, and 6- and 9-week old embryo cells (SEQ ID NOS:90-101); human liver, spleen, pituitary, lymph node, fetal kidney, and fetal lung cells (SEQ ID NOS:102-103); human brain, bone marrow, adrenal gland, liver, lymph node, mammary gland, prostate, pancreas, pituitary, placenta, thymus, trachea, skeletal muscle, kidney, thyroid, testis, activated T-cells, spleen, fetal brain, lung, umbilical vein endothelium, and fetal kidney cells (SEQ ID NOS:104-128); human pituitary, lymph node, fetal kidney, and osteocarcinoma cells (SEQ ID NOS:129-132); and fetal brain, brain, pituitary, cerebellum, spinal cord, thymus, spleen, lymph node, bone marrow, trachea, lung, kidney, fetal liver, liver, prostate, testis, thyroid, adrenal gland, pancreas, salivary gland, stomach, small intestine, colon, skeletal muscle, heart, uterus, placenta, mammary gland, adipose, skin, esophagus, bladder, cervix, rectum, pericardium, eye, ovary, fetal kidney, fetal lung, gall bladder, tongue, aorta, 6-, 9-, and 12-week old embryos, osteosarcoma, embryonic carcinoma, umbilical vein, and microvascular endothelial cells (SEQ ID NOS:133-136).

[0026] The present invention encompasses the nucleotides presented in the Sequence Listing, host cells expressing such nucleotides, the expression products of such nucleotides, and: (a) nucleotides that encode mammalian homologs of the described nucleotides, including the specifically described secreted protein nucleotide sequences, and related secreted protein products; (b) nucleotides that encode one or more portions of the described secreted proteins corresponding to a secreted protein functional domain(s), and the polypeptide products specified by such nucleotide sequences, including, but not limited to, the novel regions of any active domain(s); (c) isolated nucleotides that encode mutant versions, engineered or naturally occurring, of the described secreted proteins, in which all or a part of at least one domain is deleted or altered, and the polypeptide products specified by such nucleotide sequences, including, but not limited to, soluble proteins and peptides; (d) nucleotides that encode chimeric fusion proteins containing all or a portion of a coding region of a secreted protein, or one of its domains (e.g., a receptor or ligand binding domain, accessory protein/self-association domain, etc.) fused to another peptide or polypeptide; or (e) therapeutic or diagnostic derivatives of the described polynucleotides, such as oligonucleotides, antisense polynucleotides, ribozymes, dsRNA, or gene therapy constructs, comprising a sequence first disclosed in the Sequence Listing.

[0027] As discussed above, the present invention includes the human DNA sequences presented in the Sequence Listing (and vectors comprising the same), and additionally contemplates any nucleotide sequence encoding a contiguous secreted protein open reading frame (ORF) that hybridizes to a complement of a DNA sequence presented in the Sequence Listing under highly stringent conditions, e.g., hybridization to filter-bound DNA in 0.5 M NaHPO₄, 7% sodium dodecyl sulfate (SDS), 1 mM EDTA at 65° C., and washing in 0.1×SSC/0.1% SDS at 68° C. (“Current Protocols in Molecular Biology”, Vol. 1, p. 2.10.3 (Ausubel et al., eds., Green Publishing Associates, Inc., and John Wiley & Sons, Inc., New York, 1989)) and encodes a functionally equivalent expression product. Additionally contemplated are any nucleotide sequences that hybridize to the complement of a DNA sequence that encodes and expresses an amino acid sequence presented in the Sequence Listing under moderately stringent conditions, e.g., washing in 0.2×SSC/0.1% SDS at 42° C. (“Current Protocols in Molecular Biology”, supra), yet still encode a functionally equivalent secreted protein product. Functional equivalents of the described secreted proteins include naturally occurring homologs of the described secreted proteins present in other species, and mutant versions of the described secreted proteins, whether naturally occurring or engineered (by site directed mutagenesis, gene shuffling, directed evolution as described in, for example, U.S. Pat. No. 5,837,458). The invention also includes degenerate nucleic acid variants of the disclosed secreted protein polynucleotide sequences.

[0028] Additionally contemplated are polynucleotides encoding secreted protein ORFs, or their functional equivalents, encoded by polynucleotide sequences that are about 99, 95, 90, or about 85 percent similar or identical to corresponding regions of the nucleotide sequences of the Sequence Listing (as measured by BLAST sequence comparison analysis using, for example, the GCG sequence analysis package (the University of Wisconsin GCG sequence analysis package, SEQUENCHER 3.0, Gene Codes Corp., Ann Arbor, Mich.) using default settings).

[0029] The invention also includes nucleic acid molecules, preferably DNA molecules, that hybridize to, and are therefore the complements of, the described secreted protein nucleotide sequences. Such hybridization conditions may be highly stringent or less highly stringent, as described herein. In instances where the nucleic acid molecules are deoxyoligonucleotides, such molecules are generally about 16 to about 100 bases long, or about 20 to about 80 bases long, or about 34 to about 45 bases long, or any variation or combination of sizes represented therein that incorporate a contiguous region of sequence first disclosed in the Sequence Listing. Such oligonucleotides can be used in conjunction with the polymerase chain reaction (PCR) to screen libraries, isolate clones, and prepare cloning and sequencing templates, etc.

[0030] Alternatively, such secreted protein oligonucleotides can be used as hybridization probes for screening libraries, and assessing gene expression patterns (particularly using a microarray or high-throughput “chip” format). Additionally, a series of oligonucleotide sequences, or the complements thereof, can be used to represent all or a portion of the described secreted protein sequences. An oligonucleotide or polynucleotide sequence first disclosed in at least a portion of one or more of the sequences of SEQ ID NOS:1-136 can be used as a hybridization probe in conjunction with a solid support matrix/substrate (resins, beads, membranes, plastics, polymers, metal or metallized substrates, crystalline or polycrystalline substrates, etc.). Of particular note are spatially addressable arrays (i.e., gene chips, microtiter plates, etc.) of oligonucleotides and polynucleotides, or corresponding oligopeptides and polypeptides, wherein at least one of the biopolymers present on the spatially addressable array comprises an oligonucleotide or polynucleotide sequence first disclosed in at least one of the sequences of SEQ ID NOS:1-136, or an amino acid sequence encoded thereby. Methods for attaching biopolymers to, or synthesizing biopolymers on, solid support matrices, and conducting binding studies thereon, are disclosed in, inter alia, U.S. Pat. Nos. 5,700,637, 5,556,752, 5,744,305, 4,631,211, 5,445,934, 5,252,743, 4,713,326, 5,424,186, and 4,689,405.

[0031] Addressable arrays comprising sequences first disclosed in SEQ ID NOS:1-136 can be used to identify and characterize the temporal and tissue specific expression of a gene. These addressable arrays incorporate oligonucleotide sequences of sufficient length to confer the required specificity, yet be within the limitations of the production technology. The length of these probes is usually within a range of between about 8 to about 2000 nucleotides. Preferably the probes consist of 60 nucleotides, and more preferably 25 nucleotides, from the sequences first disclosed in SEQ ID NOS:1-136.

[0032] For example, a series of oligonucleotide sequences, or the complements thereof, can be used in chip format to represent all or a portion of the described secreted protein sequences. The oligonucleotides, typically between about 16 to about 40 (or any whole number within the stated range) nucleotides in length, can partially overlap each other, and/or the sequence may be represented using oligonucleotides that do not overlap. Accordingly, the described polynucleotide sequences shall typically comprise at least about two or three distinct oligonucleotide sequences of at least about 8 nucleotides in length that are each first disclosed in the described Sequence Listing. Such oligonucleotide sequences can begin at any nucleotide present within a sequence in the Sequence Listing, and proceed in either a sense (5′-to-3′) orientation vis-a-vis the described sequence or in an antisense orientation.

[0033] Microarray-based analysis allows the discovery of broad patterns of genetic activity, providing new understanding of gene functions, and generating novel and unexpected insight into transcriptional processes and biological mechanisms. The use of addressable arrays comprising sequences first disclosed in SEQ ID NOS:1-136 provides detailed information about transcriptional changes involved in a specific pathway, potentially leading to the identification of novel components, or gene functions that manifest themselves as novel phenotypes.

[0034] Probes consisting of sequences first disclosed in SEQ ID NOS:1-136 can also be used in the identification, selection, and validation of novel molecular targets for drug discovery. The use of these unique sequences permits the direct confirmation of drug targets, and recognition of drug dependent changes in gene expression that are modulated through pathways distinct from the intended target of the drug. These unique sequences therefore also have utility in defining and monitoring both drug action and toxicity.

[0035] As an example of utility, the sequences first disclosed in SEQ ID NOS:1-136 can be utilized in microarrays, or other assay formats, to screen collections of genetic material from patients who have a particular medical condition. These investigations can also be carried out using the sequences first disclosed in SEQ ID NOS:1-136 in silico, and by comparing previously collected genetic databases and the disclosed sequences using computer software known to those in the art.

[0036] Thus the sequences first disclosed in SEQ ID NOS:1-136 can be used to identify mutations associated with a particular disease, and also in diagnostic or prognostic assays.

[0037] Although the presently described sequences have been specifically described using nucleotide sequence, it should be appreciated that each of the sequences can uniquely be described using any of a wide variety of additional structural attributes, or combinations thereof. For example, a given sequence can be described by the net composition of the nucleotides present within a given region of the sequence, in conjunction with the presence of one or more specific oligonucleotide sequence(s) first disclosed in SEQ ID NOS:1-136. Alternatively, a restriction map specifying the relative positions of restriction endonuclease digestion sites, or various palindromic or other specific oligonucleotide sequences, can be used to structurally describe a given sequence. Such restriction maps, which are typically generated by widely available computer programs (e.g., the University of Wisconsin GCG sequence analysis package, SEQUENCHER 3.0, Gene Codes Corp., etc.), can optionally be used in conjunction with one or more discrete nucleotide sequence(s) present in the sequence that can be described by the relative position of the sequence relative to one or more additional sequence(s) or one or more restriction sites present in the disclosed sequence.

[0038] For oligonucleotide probes, highly stringent conditions may refer, e.g., to washing in 6×SSC/0.05% sodium pyrophosphate at 37° C. (for 14-base oligonucleotides), 48° C. (for 17-base oligonucleotides), 55° C. (for 20-base oligonucleotides), and 60° C. (for 23-base oligonucleotides). These nucleic acid molecules may encode or act as antisense molecules, useful, for example, in gene regulation of the described secreted protein nucleic acid sequences and/or as antisense primers in amplification reactions of the described secreted protein nucleic acid sequences. With respect to gene regulation, such techniques can be used to regulate biological functions. Further, such sequences may be used as part of ribozyme and/or triple helix sequences that are also useful for gene regulation of the described secreted protein nucleic acid sequences.

[0039] Inhibitory antisense or double stranded oligonucleotides can additionally comprise at least one modified base moiety that is selected from the group including, but not limited to, 5-fluorouracil, 5-bromouracil, 5-chlorouracil, 5-iodouracil, hypoxanthine, xanthine, 4-acetylcytosine, 5-(carboxyhydroxylmethyl) uracil, 5-carboxymethylaminomethyl-2-thiouridine, 5-carboxymethylaminomethyluracil, dihydrouracil, beta-D-galactosylqueosine, inosine, N6-isopentenyladenine, 1-methylguanine, 1-methylinosine, 2,2-dimethylguanine, 2-methyladenine, 2-methylguanine, 3-methylcytosine, 5-methylcytosine, N6-adenine, 7-methylguanine, 5-methylaminomethyluracil, 5-methoxyaminomethyl-2-thiouracil, beta-D-mannosylqueosine, 5′-methoxycarboxymethyluracil, 5-methoxyuracil, 2-methylthio-N6-isopentenyladenine, uracil-5-oxyacetic acid (v), wybutoxosine, pseudouracil, queosine, 2-thiocytosine, 5-methyl-2-thiouracil, 2-thiouracil, 4-thiouracil, 5-methyluracil, uracil-5-oxyacetic acid methylester, 3-(3-amino-3-N-2-carboxypropyl) uracil, (acp3)w, and 2,6-diaminopurine.

[0040] The antisense oligonucleotide can also comprise at least one modified sugar moiety selected from the group including, but not limited to, arabinose, 2-fluoroarabinose, xylulose, and hexose.

[0041] In yet another embodiment, the antisense oligonucleotide will comprise at least one modified phosphate backbone selected from the group including, but not limited to, a phosphorothioate, a phosphorodithioate, a phosphoramidothioate, a phosphoramidate, a phosphordiamidate, a methylphosphonate, an alkyl phosphotriester, and a formacetal or analog thereof.

[0042] In yet another embodiment, the antisense oligonucleotide is an α-anomeric oligonucleotide. An α-anomeric oligonucleotide forms specific double-stranded hybrids with complementary RNA in which, contrary to the usual β-units, the strands run parallel to each other (Gautier et al., Nucl. Acids Res. 15:6625-6641, 1987). The oligonucleotide is a 2′-0-methylribonucleotide (Inoue et al., Nucl. Acids Res. 15:6131-6148, 1987), or a chimeric RNA-DNA analogue (Inoue et al., FEBS Lett. 215:327-330, 1987). Alternatively, double stranded RNA can be used to disrupt the expression and function of a targeted secreted protein sequence.

[0043] Oligonucleotides of the invention can be synthesized by standard methods known in the art, e.g., by use of an automated DNA synthesizer (such as are commercially available from Biosearch Technologies, Inc., Novato, Calif., Applied Biosystems, Foster City, Calif., etc.). As examples, phosphorothioate oligonucleotides can be synthesized (Stein et al., Nucl. Acids Res. 16:3209-3221, 1988), and methylphosphonate oligonucleotides can be prepared by use of controlled pore glass polymer supports (Sarin et al., Proc. Natl. Acad. Sci. USA 85:7448-7451, 1988), etc.

[0044] Low stringency conditions are well-known to those of skill in the art, and will vary predictably depending on the specific organisms from which the library and the labeled sequences are derived. For guidance regarding such conditions, see, for example, “Molecular Cloning, A Laboratory Manual” (Sambrook et al., eds., Cold Spring Harbor Press, Cold Spring Harbor, N.Y., 1989), “Current Protocols in Molecular Biology”, supra, and periodic updates thereof.

[0045] Alternatively, suitably labeled secreted protein nucleotide probes can be used to screen a human genomic library using appropriately stringent conditions or by PCR. The identification and characterization of human genomic clones is helpful for identifying polymorphisms (including, but not limited to, nucleotide repeats, microsatellite alleles, single nucleotide polymorphisms, or coding single nucleotide polymorphisms), determining the genomic structure of a given locus/allele, and designing diagnostic tests. For example, sequences derived from regions adjacent to the intron/exon boundaries of the human gene can be used to design primers for use in amplification assays to detect mutations within the exons, introns, splice sites (e.g., splice acceptor and/or donor sites), etc., that can be used in diagnostics and pharmacogenomics.

[0046] For example, the present sequences can be used in restriction fragment length polymorphism (RFLP) analysis to identify specific individuals. In this technique, an individual's genomic DNA is digested with one or more restriction enzymes, and probed on a Southern blot to yield unique bands for identification (as generally described in U.S. Pat. No. 5,272,057). In addition, the sequences of the present invention can be used to provide polynucleotide reagents, e.g., PCR primers, targeted to specific loci in the human genome, which can enhance the reliability of DNA-based forensic identifications by, for example, providing another “identification marker” (i.e., another DNA sequence that is unique to a particular individual). Actual base sequence information can be used for identification as an accurate alternative to patterns formed by restriction enzyme generated fragments.

[0047] Further, homologs of the described secreted protein sequences can be isolated from nucleic acid from an organism of interest by performing PCR using two degenerate or “wobble” oligonucleotide primer pools designed on the basis of amino acid sequences within the secreted protein products disclosed herein. The template for the reaction may be genomic DNA, or total RNA, mRNA, and/or cDNA obtained by reverse transcription of mRNA, prepared from human or non-human cell lines or tissue known to express, or suspected of expressing, an allele of a gene encoding the described secreted proteins. The PCR product can be subcloned and sequenced to ensure that the amplified sequences represent the sequence of the desired secreted protein gene. The PCR fragment can then be used to isolate a full length cDNA clone by a variety of methods. For example, the amplified fragment can be labeled and used to screen a cDNA library, such as a bacteriophage cDNA library. Alternatively, the labeled fragment can be used to isolate genomic clones via the screening of a genomic library.

[0048] PCR technology can also be used to isolate full length cDNA sequences. For example, RNA can be isolated, following standard procedures, from an appropriate cellular or tissue source (i.e., one known to express, or suspected of expressing, a gene encoding the described secreted proteins). A reverse transcription (RT) reaction can be performed on the RNA using an oligonucleotide primer specific for the most 5′ end of the amplified fragment for the priming of first strand synthesis. The resulting RNA/DNA hybrid may then be “tailed” using a standard terminal transferase reaction, the hybrid may be digested with RNase H, and second strand synthesis may then be primed with a complementary primer. Thus, cDNA sequences upstream of the amplified fragment can be isolated. For a review of cloning strategies that can be used, see, e.g., “Molecular Cloning, A Laboratory Manual”, supra.

[0049] A cDNA encoding a mutant version of the described secreted protein sequences can be isolated, for example, by using PCR. In this case, the first cDNA strand may be synthesized by hybridizing an oligo-dT oligonucleotide to mRNA isolated from tissue known to express, or suspected of expressing, the described secreted proteins, in an individual putatively carrying a mutant allele of a gene encoding the described secreted proteins, and by extending the new strand with reverse transcriptase. The second strand of the cDNA is then synthesized using an oligonucleotide that hybridizes specifically to the 5′ end of the normal sequence. Using these two primers, the product is then amplified via PCR, optionally cloned into a suitable vector, and subjected to DNA sequence analysis through methods well-known to those of skill in the art. By comparing the DNA sequence of the mutant allele to that of a corresponding normal allele, the mutation(s) responsible for the loss or alteration of function of the mutant version of the described secreted protein gene products can be ascertained.

[0050] Alternatively, a genomic library can be constructed using DNA obtained from an individual suspected of carrying, or known to carry, a mutant allele of a gene encoding the described secreted proteins (e.g., a person manifesting a phenotype associated with the described secreted proteins, such as, for example, abnormal body weight, obesity, cardiovascular disease, hyperproliferative disorders, high blood pressure, thrombosis, restenosis, disorders of the joints or circulatory systems, abnormal blood clotting, cancer, developmental defects, paralysis or palsy, nerve damage or degeneration, osteoporosis, connective tissue disorders, infertility, an inflammatory disorder, arthritis, Wilson's disease, vision disorders, etc.), or a cDNA library can be constructed using RNA from a tissue known to express, or suspected of expressing, a mutant allele of a gene encoding the described secreted proteins. A normal allele of a gene encoding the described secreted proteins, or any suitable fragment thereof, can then be labeled and used as a probe to identify the corresponding mutant allele of a gene encoding the described secreted proteins in such libraries. Clones containing mutant versions of the described secreted proteins can then be purified and subjected to sequence analysis according to methods well-known to those skilled in the art.

[0051] Additionally, an expression library can be constructed utilizing cDNA synthesized from, for example, RNA isolated from a tissue known to express, or suspected of expressing, a mutant allele of a gene encoding the described secreted proteins, in an individual suspected of carrying, or known to carry, such a mutant allele. In this manner, gene products made by the putatively mutant tissue can be expressed and screened using standard antibody screening techniques in conjunction with antibodies raised against a normal version of the described secreted protein product, as described below (for screening techniques, see, for example, “Antibodies: A Laboratory Manual” (Harlow and Lane, eds., Cold Spring Harbor Press, Cold Spring Harbor, N.Y., 1988)).

[0052] Additionally, screening can be accomplished by screening with labeled secreted protein fusion proteins, such as, for example, alkaline phosphatase-secreted protein or secreted protein-alkaline phosphatase fusion proteins. In cases where a mutation of the described secreted proteins results in an expression product with altered function (e.g., as a result of a missense or a frameshift mutation), polyclonal antibodies to the described secreted proteins are likely to cross-react with a corresponding mutant version of the described secreted proteins. Library clones detected via their reaction with such labeled antibodies can be purified and subjected to sequence analysis according to methods well-known in the art.

[0053] The invention also encompasses: (a) DNA vectors that contain any of the foregoing secreted protein coding sequences and/or their complements (i.e., antisense); (b) DNA expression vectors that contain any of the foregoing secreted protein coding sequences operatively associated with a regulatory element that directs the expression of the coding sequences (for example, baculovirus as described in U.S. Pat. No. 5,869,336 herein incorporated by reference); (c) genetically engineered host cells that contain any of the foregoing secreted protein coding sequences operatively associated with a regulatory element that directs the expression of the coding sequences in the host cell; and (d) genetically engineered host cells that express an endogenous secreted protein sequence under the control of an exogenously introduced regulatory element (i.e., gene activation). As used herein, regulatory elements include, but are not limited to, inducible and non-inducible promoters, enhancers, operators, and other elements known to those skilled in the art that drive and regulate expression. Such regulatory elements include, but are not limited to, the cytomegalovirus (hCMV) immediate early gene, regulatable, viral elements (particularly retroviral LTR promoters), the early or late promoters of SV40 or adenovirus, the lac system, the trp system, the TAC system, the TRC system, the major operator and promoter regions of phage lambda, the control regions of fd coat protein, the promoter for 3-phosphoglycerate kinase (PGK), the promoters of acid phosphatase, and the promoters of the yeast α-mating factors.

[0054] The present invention also encompasses antibodies and anti-idiotypic antibodies (including Fab fragments), antagonists and agonists of the described secreted proteins, as well as compounds or nucleotide constructs that inhibit (transcription factor inhibitors, antisense and ribozyme molecules, or open reading frame sequence or regulatory sequence replacement constructs), or promote (e.g., expression constructs in which secreted protein coding sequences are operatively associated with expression control elements, such as promoters, promoter/enhancers, etc.) expression of the described secreted proteins.

[0055] The described secreted proteins, peptides, fusion proteins, nucleotide sequences, antibodies, antagonists, and agonists can be useful for the detection of mutant or inappropriately expressed versions of the described secreted proteins for the diagnosis of disease. The described secreted proteins, peptides, fusion proteins, nucleotide sequences, host cell expression systems, antibodies, antagonists, agonists, and genetically engineered cells and animals can be used for screening for drugs (or high throughput screening of combinatorial libraries) effective in the treatment of the symptomatic or phenotypic manifestations of perturbing the normal function of the described secreted proteins in the body. The use of engineered host cells and/or animals may offer an advantage in that such systems allow not only for the identification of compounds that bind to an endogenous receptor for the described secreted proteins, but can also identify compounds that trigger activities or pathways mediated by the described secreted proteins.

[0056] Finally, the described secreted protein products can be used as therapeutics (i.e., for the treatment of Wilson's Disease, etc.). For example, soluble derivatives, such as a mature version of the described secreted proteins, peptides or domains corresponding to the described secreted proteins, secreted protein fusion protein products (especially Ig fusion proteins, i.e., fusions of the described secreted proteins, or a domain of the described secreted proteins, to an IgFc), secreted protein antibodies and anti-idiotypic antibodies (including Fab fragments), antagonists or agonists (including compounds that modulate or act on downstream targets in a pathway mediated by the described secreted proteins) can be used to directly treat diseases or disorders. For instance, the administration of an effective amount of a soluble secreted protein, a secreted protein-IgFc fusion protein, or an anti-idiotypic antibody (or its Fab) that mimics the secreted protein, could activate or effectively antagonize an endogenous secreted protein receptor. Soluble versions of the described secreted proteins can also be modified by proteolytic cleavage to active peptide products (e.g., any novel peptide sequence initiating at any one of the amino acids presented in the Sequence Listing and ending at any downstream amino acid). Such products or peptides can be further subject to modification such as the construction of secreted protein fusion proteins and/or can be derivatized by being combined with pharmaceutically acceptable agents such as, but not limited to, polyethylene glycol (PEG).

[0057] Nucleotide constructs encoding such secreted protein products can be used to genetically engineer host cells to express such products in vivo; these genetically engineered cells function as “bioreactors” in the body delivering a continuous supply of the described secreted proteins, peptides, or fusion proteins to the body. Nucleotide constructs encoding functional or mutant versions of the described secreted proteins, as well as antisense and ribozyme molecules, can also be used in “gene therapy” approaches for the modulation of expression of the described secreted proteins. Thus, the invention also encompasses pharmaceutical formulations and methods for treating biological disorders.

[0058] Various aspects of the invention are described in greater detail in the subsections below.

### 7.1 Nucleic Acid Sequences

[0059] The cDNA sequences and corresponding deduced amino acid sequences of the described secreted proteins are presented in the Sequence Listing. The secreted protein nucleotide sequences were compiled from or obtained by: gene trapped cDNAs and clones isolated from a human testis cDNA library, and a human placenta cDNA (SEQ ID NOS:1-3); human gene trapped sequence tags (SEQ ID NOS:4-7); human gene trapped sequence tags and polynucleotides isolated from a human adrenal gland library (SEQ ID NOS:8-12); clustered human gene trapped sequences and ESTs (SEQ ID NOS:13 and 14); human gene trapped sequence tags, cDNA clones from a human mammary gland cDNA library, and the 39 N-terminal bases of human ceruloplasmin, much of which represents signal sequence that is cleaved from the precursor protein during secretion to produce a mature protein (SEQ ID NOS:15 and 16); gene trapped sequences, in conjunction with sequences available in GenBank and cDNAs isolated from human kidney mRNA (SEQ ID NOS:17-25); aligning human genomic sequences and cDNA clones from a human prostate cDNA library (SEQ ID NOS:26-30); cDNA products isolated from human testis and embryo libraries (SEQ ID NOS:31-49); aligning human genomic sequences and cDNAs made from human spleen, uterus, and trachea mRNAs (SEQ ID NOS:50-52); aligning cDNAs from pituitary and testis mRNAs and human genomic DNA sequence (SEQ ID NOS:53-57); clustered genomic sequence, ESTs, gene trapped sequence data, and cDNAs from mammary gland, thyroid, adipose, lymph node, testis, skeletal muscle, kidney, esophagus, heart, placenta, and bone marrow mRNAs (SEQ ID NOS:58-61); aligning cDNAs from thymus mRNAs and human genomic DNA sequence (SEQ ID NOS:62-66); aligning cDNAs from gene trapped human cells, and adipose and testis mRNAs, and human genomic DNA sequence (SEQ ID NOS:67-71); genomic sequence and cDNA clones from human lymph node, adipose, placenta, cerebellum, and pituitary cDNAs (SEQ ID NOS:72-78); aligning cDNAs from brain and kidney mRNAs and human genomic DNA sequence (SEQ ID NOS:79-83); aligning cDNAs from bone marrow and skeletal muscle mRNAs and human genomic P DNA sequence (SEQ ID NOS:84-86); aligning cDNAs made from testis and human fetal mRNA and human genomic DNA sequence (SEQ ID NOS:87-89); clustered genomic sequence, ESTs, and cDNAs produced using human brain, lymph node, fetal kidney, fetal lung, and hypothalamus mRNAs (SEQ ID NOS:90-101); clustered genomic sequence, ESTs, and cDNAs generated from human lymph node, liver, spleen, and fetal kidney mRNAs (SEQ ID NOS:102-103); aligning cDNAs from human kidney, fetal kidney, prostate, and lymph node mRNAs and human genomic DNA sequence (SEQ ID NOS:104-128); human genomic sequence and cDNAs made from human fetal lung and lymph node mRNAs (SEQ ID NOS:129-132); and aligning cDNAs from human brain, skeletal muscle, liver, testis, placenta, lung, bone marrow, lymph node, and prostate mRNAs and human genomic DNA sequence (SEQ ID NOS:133-136). mRNA and cDNA libraries were purchased from Clontech (Palo Alto, Calif.) and/or Edge Biosystems (Gaithersburg, Md.).

[0060] The described sequences are apparently encoded on: human chromosome 17 (SEQ ID NOS:26-30); human chromosome 10 (SEQ ID NOS:50-52); human chromosome 9, see GenBank Accession Number AC008888 (SEQ ID NOS:53-57); human chromosome 1, see GenBank Accession Number AF156100 (SEQ ID NOS:58-61); human chromosome 13, see GenBank Accession Number AL137780 (SEQ ID NOS:67-71); human chromosome 9, see GenBank Accession Number AL354982 (SEQ ID NOS:72-78); human chromosome 17, see GenBank Accession Number AC019316 (SEQ ID NOS:79-83); human chromosome 1 or both of human chromosomes 4 and 6, see GenBank Accession Numbers AC048370 and AC016488 (SEQ ID NOS:84-86); human chromosome 1, see GenBank Accession Number AL356323 (SEQ ID NOS:87-89); human chromosome 1, see GenBank Accession Number AL359826 (SEQ ID NOS:90-102); multiple exons interspersed on human chromosome 11, see GenBank Accession Number AC090384 (SEQ ID NOS:102-103); human chromosome 7, see GenBank Accession Number AC024952 (SEQ ID NOS:104-128); several exons dispersed on human chromosome 1, see GenBank Accession Number AL138787 (SEQ ID NOS:129-132); and human chromosome 7, see GenBank Accession Number AC009262 (SEQ ID NOS:133-136). As such, the described sequences are useful for mapping the coding region of the human genome, and for identifying exon splice junctions (which can, among other things, have direct application in forensic studies).

[0061] A number of polymorphisms were identified during the sequencing of the described nucleotide sequences, including: a transcriptionally silent C-to-T transition at nucleotide (nt) position 81 of SEQ ID NO:1, both of which result in an asparagine residue at corresponding amino acid (aa) position 27 of SEQ ID NO:2; a G-to-C transversion at nt position 965 of SEQ ID NO:1, which can result in a serine or threonine residue at corresponding aa position 322 of SEQ ID NO:2; a C-to-G transversion at nt position 165 of the 5′ UTR of SEQ ID NO:3; an A-to-G transition at nt position 598 of SEQ ID NO:13, which can result in an isoleucine or valine residue at corresponding aa position 200 of SEQ ID NO:14; a G-to-A transition at nt position 1756 of SEQ ID NO:15 (denoted by an “r” in the Sequence Listing), which can result in a valine or isoleucine residue at corresponding aa position 586 of SEQ ID NO:16; a G-to-C transversion at nt position 212 of SEQ ID NOS:17 and 19, and nt position 236 of SEQ ID NOS:21 and 23 (denoted by an “s” in the Sequence Listing), which can result in a glycine or alanine residue at corresponding aa position 71 of SEQ ID NOS:18 and 20, and aa position 79 of SEQ ID NOS:22 and 24; an A-to-C transversion at nt position 219 of SEQ ID NOS:17 and 19, and nt position 243 of SEQ ID NOS:21 and 23 (denoted by an “m” in eh Sequence Listing), which can result in a lysine or asparagine residue at corresponding aa position 73 of SEQ ID NOS:18 and 20, and aa position 81 of SEQ ID NOS:22 and 24; a silent G-to-A transition at nt position 30 of SEQ ID NOS:21 and 23 (denoted by an “r” in the Sequence Listing), both of which result in a glutamine residue at corresponding aa position 10 of SEQ ID NOS:22 and 24; a C/G transversion at nt position 242 of SEQ ID NOS:53 and 55, which can result in an alanine or glycine residue at corresponding aa position 81 of SEQ ID NOS:54 and 56; a T/G transversion at nt position 289 of SEQ ID NOS:53 and 55, which can result in a leucine or valine residue at corresponding aa position 97 of SEQ ID NOS:54 and 56; a T/C polymorphism at nt position 397 of SEQ ID NO:58 (denoted by a “y” in the Sequence Listing), which can result in a serine or proline residue at corresponding aa position 133 of SEQ ID NO:59; a T/A polymorphism at nt position 1124 of SEQ ID NO:58 (denoted by a “w” in the Sequence Listing), which can result in an isoleucine or asparagine residue at corresponding aa position 375 of SEQ ID NO:59; an A/G polymorphism at nt position 2072 of SEQ ID NO:58 (denoted by an “r” in the Sequence Listing), which can result in a lysine or arginine residue at corresponding aa position 691 of SEQ ID NO:59; a C/T polymorphism at nt position 2513 of SEQ ID NO:58 (denoted by a “y” in the Sequence Listing), which can result in a proline or leucine residue at corresponding aa position 838 of SEQ ID NO:59; a T/C polymorphism at nt position 3244 of SEQ ID NO:58 (denoted by a “y” in the Sequence Listing), which can result in a serine or proline residue at corresponding aa position 1082 of SEQ ID NO:59; an A/G polymorphism at nt position 3787 of SEQ ID NO:58 (denoted by an “r” in the Sequence Listing), which can result in a threonine or alanine residue at corresponding aa position 1263 of SEQ ID NO:59; a silent A/G polymorphism at nt position 4665 of SEQ ID NO:58, and nt position 489 of SEQ ID NO:60 (denoted by an “r” in the Sequence Listing), both of which result in a threonine residue at corresponding aa position 1555 of SEQ ID NO:59, and aa position 163 of SEQ ID NO:61; an A/C polymorphism at nt position 4667 of SEQ ID NO:58, and nt position 491 of SEQ ID NO:60 (denoted by an “m” in the Sequence Listing), which can result in an aspartate or alanine residue at corresponding aa position 1556 of SEQ ID NO:59, and aa position 164 of SEQ ID NO:61; a silent T/C polymorphism at nt position 4857 of SEQ ID NO:58, and nt position 681 of SEQ ID NO:60 (denoted by a “y” in the Sequence Listing), both of which result in a histidine residue at corresponding aa position 1619 of SEQ ID NO:59, and aa position 227 of SEQ ID NO:61; a T/C polymorphism at nt position 6734 of SEQ ID NO:58, and nt position 2558 of SEQ ID NO:60 (denoted by a “y” in the Sequence Listing), which can result in a valine or alanine residue at corresponding aa position 2245 of SEQ ID NO:59, and aa position 853 of SEQ ID NO:61; a T/C polymorphism at nt position 7253 of SEQ ID NO:58, and nt position 3077 of SEQ ID NO:60 (denoted by a “y” in the Sequence Listing), which can result in an isoleucine or threonine residue at corresponding aa position 2418 of SEQ ID NO:59, and aa position 1026 of SEQ ID NO:61; a silent G/C polymorphism at nt position 11940 of SEQ ID NO:58, and nt position 7764 of SEQ ID NO:60 (denoted by an “s” in the Sequence Listing), both of which result in a valine residue at corresponding aa position 3980 of SEQ ID NO:59, and aa position 2588 of SEQ ID NO:61; a T/A polymorphism at nt position 12136 of SEQ ID NO:58, and nt position 7960 of SEQ ID NO:60 (denoted by a “w” in the Sequence Listing), which can result in a serine or threonine residue at corresponding aa position 4046 of SEQ ID NO:59, and aa position 2654 of SEQ ID NO:61; a G/A polymorphism at nt position 1102 of SEQ ID NOS:72, 74, and 76, which can result in an alanine or threonine residue at corresponding aa position 368 of SEQ ID NOS:73, 75, and 77; a silent A/C polymorphism at nt position 1306 of SEQ ID NOS:72, 74, and 76, both of which result in an arginine residue at corresponding aa position 436 of SEQ ID NOS:73, 75, and 77; a C/T polymorphism at nt position 1823 of SEQ ID NOS:72, 74, and 76, which can result in an alanine or valine residue at corresponding aa position 608 of SEQ ID NOS:73, 75, and 77; an A/C polymorphism at nt position 2143 of SEQ ID NOS:72, 74, and 76, which can result in a threonine or proline residue at corresponding aa position 715 of SEQ ID NOS:73, 75, and 77; a silent A/C polymorphism at nt position 2202 of SEQ ID NOS:72, 74, and 76, both of which result in a valine residue at corresponding aa position 734 of SEQ ID NOS:73, 75, and 77; a silent A/G polymorphism at nt position 2283 of SEQ ID NOS:72, 74, and 76, both of which result in a glutamate residue at corresponding aa position 761 of SEQ ID NOS:73, 75, and 77; a G/A polymorphism at nt position 2285 of SEQ ID NOS:72, 74, and 76, which can result in a glycine or glutamate residue at corresponding aa position 762 of SEQ ID NOS:73, 75, and 77; a silent A/C polymorphism at nt position 2601 of SEQ ID NOS:72, 74, and 76, both of which result in a glycine residue at corresponding aa position 867 of SEQ ID NOS:73, 75, and 77; an A/G polymorphism at nt position 2696 of SEQ ID NOS:72, 74, and 76, which can result in a lysine or arginine residue at corresponding aa position 899 of SEQ ID NOS:73, 75, and 77; an AG/TT polymorphism at nt positions 2776-2777 of SEQ ID NOS:72, 74, and 76, which can result in a leucine or arginine residue at corresponding aa position 926 of SEQ ID NOS:73, 75, and 77; an A/C polymorphism at nt position 2873 of SEQ ID NOS:72, 74, and 76, which can result in an asparagine or threonine residue at corresponding aa position 958 of SEQ ID NOS:73, 75, and 77; a silent G/A polymorphism at nt position 3114 of SEQ ID NOS:72, 74, and 76, both of which result in a glycine residue at corresponding aa position 1038 of SEQ ID NOS:73, 75, and 77; an AT/TC polymorphism at nt positions 3115-3116 of SEQ ID NOS:72, 74, and 76, which can result in a methionine or serine residue at corresponding aa position 1039 of SEQ ID NOS:73, 75, and 77; a C/A polymorphism at nt position 4246 of SEQ ID NOS:74 and 76, which can result in a glutamine or lysine residue at corresponding aa position 1416 of SEQ ID NOS:75 and 77; a G/A polymorphism at nt position 4813 of SEQ ID NOS:74 and 76, which can result in a valine or methionine residue at corresponding aa position 1605 of SEQ ID NOS:75 and 77; a C/A polymorphism at nt position 5429 of SEQ ID NOS:74 and 76, which can result in an alanine or glutamate residue at corresponding aa position 1810 of SEQ ID NOS:75 and 77; an A/T polymorphism at nt position 5527 of SEQ ID NOS:74 and 76, which can result in a lysine residue or a STOP codon at corresponding aa position 1843 of SEQ ID NOS:75 and 77; a C/T polymorphism at nt position 6089 of SEQ ID NO:74, which can result in an alanine or valine residue at corresponding aa position 2030 of SEQ ID NO:75; a C/G polymorphism at nt position 6092 of SEQ ID NO:74, which can result in a serine or cysteine residue at corresponding aa position 2031 of SEQ ID NO:75; a C/G polymorphism at nt position 6094 of SEQ ID NO:74, which can result in a proline or alanine residue at corresponding aa position 2032 of SEQ ID NO:75; an AC/CT polymorphism at nt positions 7868-7869 of SEQ ID NO:74, which can result in an aspartate or alanine residue at corresponding aa position 2623 of SEQ ID NO:75; a silent A/G polymorphism at nt position 8250 of SEQ ID NO:74, both of which result in an alanine residue at corresponding aa position 2750 of SEQ ID NO:75; a silent T/C polymorphism at nt position 8754 of SEQ ID NO:74, both of which result in a histidine residue at corresponding aa position 2918 of SEQ ID NO:75; a C/A polymorphism at nt position 9170 of SEQ ID NO:74, which can result in a proline or histidine residue at corresponding aa position 3057 of SEQ ID NO:75; a G/T polymorphism at nt position 9176 of SEQ ID NO:74, which can result in a cysteine or phenylalanine residue at corresponding aa position 3059 of SEQ ID NO:75; a T/A polymorphism at nt position 9481 of SEQ ID NO:74, which can result in a phenylalanine or isoleucine residue at corresponding aa position 3161 of SEQ ID NO:75; a silent T/A polymorphism at nt position 9576 of SEQ ID NO:74, both of which result in a valine residue at corresponding aa position 3192 of SEQ ID NO:75; a G/A polymorphism at nt position 9625 of SEQ ID NO:74, which can result in a glutamate or lysine residue at corresponding aa position 3209 of SEQ ID NO:75; a G/A polymorphism at nt position 416 of SEQ ID NO:79, and nt position 206 of SEQ ID NO:81, which can result in an arginine or glutamine residue at corresponding aa position 139 of SEQ ID NO:80, and aa position 69 of SEQ ID NO:82; a silent C/T polymorphism at nt position 993 of SEQ ID NO:79, and nt position 783 of SEQ ID NO:81, both of which result in an alanine residue at corresponding aa position 331 of SEQ ID NO:80, and aa position 261 of SEQ ID NO:82; a C/T polymorphism at nt position 1283 of SEQ ID NO:79, and nt position 1073 of SEQ ID NO:81, which can result in a valine or alanine residue at corresponding aa position 428 of SEQ ID NO:80, and aa position 358 of SEQ ID NO:82; a silent C/T polymorphism at nt position 153 of SEQ ID NO:87, both of which result in an alanine residue at corresponding aa position 51 of SEQ ID NO:88; a C/G polymorphism at nt position 946 of SEQ ID NO:87, which can result in a glutamine or glutamate residue at corresponding aa position 316 of SEQ ID NO:88; a C/A polymorphism at nt position 953 of SEQ ID NO:87, which can result in a threonine or asparagine residue at corresponding aa position 318 of SEQ ID NO:88; a silent T/C polymorphism at nt position 513 of SEQ ID NOS:90, 94, and 98, and nt position 918 of SEQ ID NOS:92, 96, and 100 (denoted by a “y” in the Sequence Listing), both of which result in a glycine residue at corresponding aa position 171 of SEQ ID NOS:91, 95, and 99, and aa position 306 of SEQ ID NOS:93, 97, and 101; a T/C polymorphism at nt position 938 of SEQ ID NOS:90, 94, and 98, and nt position 1343 of SEQ ID NOS:92, 96, and 100 (denoted by a “y” in the Sequence Listing), which can result in a valine or alanine residue at corresponding aa position 313 of SEQ ID NOS:91, 95, and 99, and aa position 448 of SEQ ID NOS:93, 97, and 101; a silent A/C polymorphism at nt position 1068 of SEQ ID NOS:90, 94, and 98, and nt position 1473 of SEQ ID NOS:92, 96, and 100 (denoted by an “m” in the Sequence Listing), both of which result in a threonine residue at corresponding aa position 356 of SEQ ID NOS:91, 95, and 99, and aa position 491 of SEQ ID NOS:93, 97, and 101; a C/G polymorphism at nt position 2562 of SEQ ID NO:90, and nt position 2967 of SEQ ID NO:92 (denoted by an “s” in the Sequence Listing), which can result in an aspartate or glutamate residue at corresponding aa position 854 of SEQ ID NO:91, and aa position 989 of SEQ ID NO:93; a silent T/C polymorphism at nt position 2640 of SEQ ID NO:90, and nt position 3045 of SEQ ID NO:92 (denoted by a “y” in the Sequence Listing), both of which result in a phenylalanine residue at corresponding aa position 880 of SEQ ID NO:91, and aa position 1015 of SEQ ID NO:93; a G/T polymorphism at nt position 92 of SEQ ID NOS:92, 96, and 100 (denoted by a “k” in the Sequence Listing), which can result in an arginine or leucine residue at corresponding aa position 31 of SEQ ID NOS:93, 97, and 101; a silent T/C polymorphism at nt position 120 of SEQ ID NOS:92, 96, and 100 (denoted by a “y” in the Sequence Listing), both of which result in a proline residue at corresponding aa position 40 of SEQ ID NOS:93, 97, and 101; a C/G polymorphism at nt position 1852 of SEQ ID NO:94, and nt position 2257 of SEQ ID NO:96 (denoted by an “s” in the Sequence Listing), which can result in an alanine or proline residue at corresponding aa position 618 of SEQ ID NO:95, and aa position 753 of SEQ ID NO:97; a silent A/C polymorphism at nt position 2085 of SEQ ID NO:94, and nt position 2490 of SEQ ID NO:96 (denoted by an “m” in the Sequence Listing), both of which result in an alanine at corresponding aa position 695 of SEQ ID NO:95, and aa position 830 of SEQ ID NO:97; a T/C polymorphism at nt position 1822 of SEQ ID NO:98, and nt position 2227 of SEQ ID NO:100 (denoted by a “y” in the Sequence Listing), which can result in a cysteine or arginine residue at corresponding aa position 608 of SEQ ID NO:99, and aa position 743 of SEQ ID NO:101; a silent A/C polymorphism at nt position 1866 of SEQ ID NO:98, and nt position 2271 of SEQ ID NO:100 (denoted by an “m” in the Sequence Listing), both of which result in a leucine residue at corresponding aa position 622 of SEQ ID NO:99, and aa position 757 of SEQ ID NO:101; a T/C polymorphism at nt position 2063 of SEQ ID NO:98, and nt position 2468 of SEQ ID NO:100 (denoted by a “y” in the Sequence Listing), which can result in a leucine or proline at corresponding aa position 688 of SEQ ID NO:99, and aa position 823 of SEQ ID NO:101; a G/C polymorphism at nt position 81 of SEQ ID NO:102, which can result in an arginine or serine residue at corresponding aa position 27 of SEQ ID NO:103; a T/A polymorphism at nt position 550 of SEQ ID NOS:104 and 106, and nt position 349 of SEQ ID NOS:114 and 116, which can result in a cysteine or serine residue at corresponding aa position 184 of SEQ ID NOS:105 and 107, and aa position 117 of SEQ ID NOS:115 and 1.17; a G/A polymorphism at nt position 274 of SEQ ID NO:129, and nt position 232 of SEQ ID NO:131, which can result in a glutamate or lysine residue at corresponding aa position 92 of SEQ ID NO:130, and aa position 78 of SEQ ID NO:132; a C/A polymorphism at nt position 424 of SEQ ID NO:129, and nt position 382 of SEQ ID NO:131, which can result in a proline or threonine residue at corresponding aa position 142 of SEQ ID NO:130, and aa position 128 of SEQ ID NO:132; a silent C/T polymorphism at nt position 732 of SEQ ID NO:129, and nt position 690 of SEQ ID NO:131, both of which result in leucine residue at corresponding aa position 244 of SEQ ID NO:130, and aa position 230 of SEQ ID NO:132; a G/A polymorphism at nt position 787 of SEQ ID NO:129, and nt position 745 of SEQ ID NO:131, which can result in a glycine or arginine residue at corresponding aa position 263 of SEQ ID NO:130, and aa position 249 of SEQ ID NO:132; a G/A polymorphism at nt position 1090 of SEQ ID NO:129, and nt position 1048 of SEQ ID NO:131, which can result in a glutamate or lysine residue at corresponding aa position 364 of SEQ ID NO:130, and aa position 350 of SEQ ID NO:132; a silent T/C polymorphism at nt position 408 of SEQ ID NOS:133 and 135, both of which result in a glycine residue at corresponding aa position 136 of SEQ ID NOS:134 and 136; an A/C polymorphism at nt position 553 of SEQ ID NOS:133 and 135, which can result in a lysine or glutamine residue at corresponding aa position 185 of SEQ ID NOS:134 and 136; a silent T/G polymorphism at nt position 1461 of SEQ ID NO:133, and nt position 1287 of SEQ ID NO:135, both of which result in a proline residue at corresponding aa position 487 of SEQ ID NO:134, and aa position 429 of SEQ ID NO:136; a silent C/G polymorphism at nt position 1935 of SEQ ID NO:133, and nt position 1761 of SEQ ID NO:135, both of which result in a threonine residue at corresponding aa position 645 of SEQ ID NO:134, and aa position 587 of SEQ ID NO:136; and a silent C/T polymorphism at nt position 2028 of SEQ ID NO:133, and nt position 1854 of SEQ ID NO:135, both of which result in a cysteine residue at corresponding aa position 676 of SEQ ID NO:134, and aa position 618 of SEQ ID NO:136. The present invention contemplates sequences comprising any and all combinations and permutations of the above polymorphisms. As these polymorphisms are coding single nucleotide polymorphisms (SNPs), they are particularly useful in forensic analysis.

[0062] An additional application of the described novel human polynucleotide sequences is their use in the molecular mutagenesis/evolution of proteins that are at least partially encoded by the described novel sequences using, for example, polynucleotide shuffling or related methodologies. Such approaches are described in U.S. Pat. Nos. 5,830,721 and 5,837,458.

[0063] The described secreted protein gene products can also be expressed in transgenic animals. Animals of any non-human species, including, but not limited to, worms, mice, rats, rabbits, guinea pigs, pigs, micro-pigs, birds, goats, and non-human primates, e.g., baboons, monkeys, and chimpanzees, may be used to generate transgenic animals comprising the described secreted protein sequences.

[0064] Any technique known in the art may be used to introduce a secreted protein transgene into animals to produce the founder lines of transgenic animals. Such techniques include, but are not limited to: pronuclear microinjection (U.S. Pat. No. 4,873,191); retrovirus-mediated gene transfer into germ lines (Van der Putten et al., Proc. Natl. Acad. Sci. USA 82:6148-6152, 1985); gene targeting in embryonic stem cells (Thompson et al., Cell 56:313-321, 1989); electroporation of embryos (Lo, Mol. Cell. Biol. 3:1803-1814, 1983); and sperm-mediated gene transfer (Lavitrano et al., Cell 57:717-723, 1989); etc. For a review of such techniques, see, e.g., Gordon, Intl. Rev. Cytol. 115:171-229, 1989.

[0065] The present invention provides for transgenic animals that carry a secreted protein transgene in all their cells, as well as animals that carry a transgene in some, but not all their cells, i.e., mosaic animals or somatic cell transgenic animals. A transgene may be integrated as a single transgene, or in concatamers, e.g., head-to-head tandems or head-to-tail tandems. A transgene may also be selectively introduced into and activated in a particular cell-type by following, for example, the teaching of Lakso et al., Proc. Natl. Acad. Sci. USA 89:6232-6236, 1992. The regulatory sequences required for such a cell-type specific activation will depend upon the particular cell-type of interest, and will be apparent to those of skill in the art.

[0066] When it is desired that a secreted protein transgene be integrated into the chromosomal site of the endogenous gene encoding the secreted protein, gene targeting is preferred. Briefly, when such a technique is to be utilized, vectors containing some nucleotide sequences homologous to the endogenous gene encoding the secreted protein are designed for the purpose of integrating, via homologous recombination with chromosomal sequences, into and disrupting the function of the nucleotide sequence of the endogenous gene encoding the secreted protein (i.e., “knockout” animals).

[0067] The transgene can also be selectively introduced into a particular cell-type, thus inactivating the endogenous gene encoding the secreted protein in only that cell-type, by following, for example, the teaching of Gu et al., Science 265:103-106, 1994. The regulatory sequences required for such a cell-type specific inactivation will depend upon the particular cell-type of interest, and will be apparent to those of skill in the art.

[0068] Once transgenic animals have been generated, the expression of the recombinant gene encoding the secreted protein may be assayed utilizing standard techniques. Initial screening may be accomplished by Southern blot analysis or PCR techniques to analyze animal tissues to assay whether integration of the transgene has taken place. The level of mRNA expression of the transgene in the tissues of the transgenic animals may also be assessed using techniques that include, but are not limited to, Northern blot analysis of tissue samples obtained from the animal, in situ hybridization analysis, and RT-PCR. Samples of secreted protein gene-expressing tissue may also be evaluated immunocytochemically using antibodies specific for the secreted protein transgene product.

[0069] The present invention also provides for “knock-in” animals. Knock-in animals are those in which a polynucleotide sequence (i.e., a gene or a cDNA) that the animal does not naturally have in its genome is inserted in such a way that it is expressed. Examples include, but are not limited to, a human gene or cDNA used to replace its murine ortholog in the mouse, a murine cDNA used to replace the murine gene in the mouse, and a human gene or cDNA or murine cDNA that is tagged with a reporter construct used to replace the murine ortholog or gene in the mouse. Such replacements can occur at the locus of the murine ortholog or gene, or at another specific site. Such knock-in animals are useful for the in vivo study, testing and validation of, intra alia, human drug targets, as well as for compounds that are directed at the same, and therapeutic proteins.

### 7.2 Amino Acid Sequences

[0070] The described secreted proteins, polypeptides, peptide fragments, mutated, truncated, or deleted forms of the described secreted proteins, and/or secreted protein fusion proteins can be prepared for a variety of uses. These uses include, but are not limited to, the generation of antibodies, as reagents in diagnostic assays, for the identification of other cellular gene products related to the described secreted proteins, and as reagents in assays for screening for compounds that can be used as pharmaceutical reagents useful in the therapeutic treatment of mental, biological, or medical disorders and diseases. Given the similarity information and expression data, the described secreted proteins can be targeted (by drugs, oligonucleotides, antibodies, etc.) in order to treat disease, or to augment the efficacy of, for example, chemotherapeutic agents used in the treatment of cancer, such as breast or prostate cancer, and therapeutic agents used in the treatment of, for example, inflammatory disorders, arthritis, or infectious diseases, as antiviral agents, or to promote healing.

[0071] The Sequence Listing discloses the amino acid sequences encoded by the described secreted protein sequences. The described secreted protein sequences display initiator methionines in DNA sequence contexts consistent with translation initiation sites, and nearly all incorporate hydrophobic sequences similar to those found in membrane and secreted proteins.

[0072] As putative secreted proteins/peptides, signal peptides associated with the described amino acid sequences may be typically cleaved during secretion of the mature protein products. Analysis of the described proteins/peptides reveals the presence of predicted signal cleavage sites between about 13 and about 53 amino acids into the described proteins (from the initiation methionine). For example, SEQ ID NO:85 displays a predicted cleavage site at or around amino acid positions 25 or 26, which indicates the approximate position of the N-terminus of the processed, or “mature,” form of the protein after cleavage by eucaryotic secretion machinery. Computer predictions of signal peptidase cleavage sites being less than absolutely accurate, an additional aspect of the present invention includes any and all mature cleavage products remaining after removal of between about the first 10 and about the first 55 amino acids, or any number in-between (as applicable given the length of the described protein), that leaves (for secretion) at least about 3, and preferably at least about 6 to 20, or more, amino acids of the protein product originally encoded by the described sequences (for secretion).

[0073] The secreted protein amino acid sequences of the invention include the amino acid sequences presented in the Sequence Listing, as well as analogues and derivatives thereof. Further, corresponding secreted protein homologues from other species are encompassed by the invention. In fact, any product encoded by the secreted protein nucleotide sequences described herein are within the scope of the invention, as are any novel polynucleotide sequences encoding all or any novel portion of an amino acid sequence presented in the Sequence Listing. The degenerate nature of the genetic code is well-known, and, accordingly, each amino acid presented in the Sequence Listing is generically representative of the well-known nucleic acid “triplet” codon, or in many cases codons, that can encode the amino acid. As such, as contemplated herein, the amino acid sequences presented in the Sequence Listing, when taken together with the genetic code (see, for example, “Molecular Cell Biology”, Table 4-1 at page 109 (Darnell et al., eds., Scientific American Books, New York, N.Y., 1986)), are generically representative of all the various permutations and combinations of nucleic acid sequences that can encode such amino acid sequences.

[0074] The invention also encompasses proteins that are functionally equivalent to the secreted proteins encoded by the presently described nucleotide sequences, as judged by any of a number of criteria, including, but not limited to, the ability to bind and cleave a substrate of the described secreted proteins, the ability to effect an identical or complementary downstream pathway, or a change in cellular metabolism (e.g., proteolytic activity, ion flux, tyrosine phosphorylation, etc.). Such functionally equivalent secreted proteins include, but are not limited to, additions or substitutions of amino acid residues within the amino acid sequence encoded by the secreted protein nucleotide sequences described herein, but that result in a silent change, thus producing a functionally equivalent expression product. Amino acid substitutions may be made on the basis of similarity in polarity, charge, solubility, hydrophobicity, hydrophilicity, and/or the amphipathic nature of the residues involved. For example, nonpolar (hydrophobic) amino acids include alanine, leucine, isoleucine, valine, proline, phenylalanine, tryptophan, and methionine; polar neutral amino acids include glycine, serine, threonine, cysteine, tyrosine, asparagine, and glutamine; positively charged (basic) amino acids include arginine, lysine, and histidine; and negatively charged (acidic) amino acids include aspartic acid and glutamic acid.

[0075] A variety of host-expression vector systems can be used to express the secreted protein nucleotide sequences of the invention. Where, as in the present instance, the peptides or polypeptides are thought to be soluble or secreted molecules, a peptide or polypeptide can be recovered from the culture media. Such expression systems also encompass engineered host cells that express the described secreted proteins, or functional equivalents, in situ. Purification or enrichment of the described secreted proteins from such expression systems can be accomplished using appropriate detergents and lipid micelles and methods well-known to those skilled in the art. However, such engineered host cells themselves may be used in situations where it is important not only to retain the structural and functional characteristics of the described secreted proteins, but to assess biological activity, e.g., in certain drug screening assays.

[0076] The expression systems that may be used for purposes of the invention include, but are not limited to, microorganisms such as bacteria (e.g., E. coli, B. subtilis) transformed with recombinant bacteriophage DNA, plasmid DNA or cosmid DNA expression vectors containing the described secreted protein nucleotide sequences; yeast (e.g., Saccharomyces, Pichia) transformed with recombinant yeast expression vectors containing the described secreted protein nucleotide sequences; insect cell systems infected with recombinant virus expression vectors (e.g., baculovirus) containing the described secreted protein nucleotide sequences; plant cell systems infected with recombinant virus expression vectors (e.g., cauliflower mosaic virus, CaMV; tobacco mosaic virus, TMV) or transformed with recombinant plasmid expression vectors (e.g., Ti plasmid) containing the described secreted protein nucleotide sequences; or mammalian cell systems (e.g., COS, CHO, BHK, 293, 3T3) harboring recombinant expression constructs containing the described secreted protein nucleotide sequences and promoters derived from the genome of mammalian cells (e.g., metallothionein promoter) or from mammalian viruses (e.g., the adenovirus late promoter; the vaccinia virus 7.5K promoter).

[0077] In bacterial systems, a number of expression vectors may be advantageously selected depending upon the use intended for the secreted protein product being expressed. For example, when a large quantity of such a protein is to be produced for the generation of pharmaceutical compositions of or containing the described secreted proteins, or for raising antibodies to the described secreted proteins, vectors that direct the expression of high levels of fusion protein products that are readily purified may be desirable. Such vectors include, but are not limited to, the E. coli expression vector pUR278 (Ruther and Muller-Hill, EMBO J. 2:1791-1794, 1983), in which the described secreted protein coding sequences may be ligated individually into the vector in-frame with the lacZ coding region so that a fusion protein is produced; pIN vectors (Inouye and Inouye, Nucl. Acids Res. 13:3101-3109, 1985; Van Heeke and Schuster, J. Biol. Chem. 264:5503-5509, 1989); and the like. PGEX vectors (Pharmacia or American Type Culture Collection) can also be used to express foreign polypeptides as fusion proteins with glutathione S-transferase (GST). In general, such fusion proteins are soluble and can easily be purified from lysed cells by adsorption to glutathione-agarose beads followed by elution in the presence of free glutathione. The pGEX vectors are designed to include thrombin or factor Xa protease cleavage sites so that the cloned target expression product can be released from the GST moiety.

[0078] In an exemplary insect system, Autographa californica nuclear polyhedrosis virus (AcNPV) is used as a vector to express foreign polynucleotide sequences. The virus grows in Spodoptera frugiperda cells. A secreted protein coding sequence can be cloned individually into a non-essential region (for example the polyhedrin gene) of the virus and placed under control of an AcNPV promoter (for example the polyhedrin promoter). Successful insertion of a secreted protein coding sequence will result in inactivation of the polyhedrin gene and production of non-occluded recombinant virus (i.e., virus lacking the proteinaceous coat coded for by the polyhedrin gene), These recombinant viruses are then used to infect Spodoptera frugiperda cells in which the inserted sequence is expressed (see, e.g., Smith et al., J. Virol. 46:584-593, 1983, and U.S. Pat. No. 4,215,051).

[0079] In mammalian host cells, a number of viral-based expression systems can be utilized. In cases where an adenovirus is used as an expression vector, the secreted protein nucleotide sequence of interest may be ligated to an adenovirus transcription/translation control complex, e.g., the late promoter and tripartite leader sequence. This chimeric sequence may then be inserted in the adenovirus genome by in vitro or in vivo recombination. Insertion in a non-essential region of the viral genome (e.g., region E1 or E3) will result in a recombinant virus that is viable and capable of expressing a secreted protein product in infected hosts (see, e.g., Logan and Shenk, Proc. Natl. Acad. Sci. USA 81:3655-3659, 1984). Specific initiation signals may also be required for efficient translation of inserted secreted protein nucleotide sequences. These signals include the ATG initiation codon and adjacent sequences. In cases where an entire secreted protein gene or cDNA, including its own initiation codon and adjacent sequences, is inserted into the appropriate expression vector, no additional translational control signals may be needed. However, in cases where only a portion of a secreted protein coding sequence is inserted, exogenous translational control signals, including, perhaps, the ATG initiation codon, may be provided. Furthermore, the initiation codon should be in phase with the reading frame of the desired coding sequence to ensure translation of the entire insert. These exogenous translational control signals and initiation codons can be of a variety of origins, both natural and synthetic. The efficiency of expression may be enhanced by the inclusion of appropriate transcription enhancer elements, transcription terminators, etc. (see, e.g., Bitter et al., Methods in Enzymol. 153:516-544, 1987).

[0080] In addition, a host cell strain may be chosen that modulates the expression of the inserted sequences, or modifies and processes the expression product in the specific fashion desired. Such modifications (e.g., glycosylation) and processing (e.g., cleavage) of protein products may be important for the function of the protein. Different host cells have characteristic and specific mechanisms for the post-translational processing and modification of proteins and expression products. Appropriate cell lines or host systems can be chosen to ensure the desired modification and processing of the foreign protein expressed. To this end, eukaryotic host cells that possess the cellular machinery for the desired processing of the primary transcript, glycosylation, and phosphorylation of the expression product may be used. Such mammalian host cells include, but are not limited to, CHO, VERO, BHK, HeLa, COS, MDCK, 293, 3T3, WI38, and in particular, human cell lines.

[0081] For long-term, high-yield production of recombinant proteins, stable expression is preferred. For example, cell lines that stably express the secreted protein sequences described herein can be engineered. Rather than using expression vectors that contain viral origins of replication, host cells can be transformed with DNA controlled by appropriate expression control elements (e.g., promoter, enhancer sequences, transcription terminators, polyadenylation sites, etc.), and a selectable marker. Following the introduction of the foreign DNA, engineered cells may be allowed to grow for 1-2 days in an enriched media, and then switched to a selective media. The selectable marker in the recombinant plasmid confers resistance to the selection and allows cells to stably integrate the plasmid into their chromosomes and grow to form foci, which in turn can be cloned and expanded into cell lines. This method may advantageously be used to engineer cell lines that express the described secreted protein products. Such engineered cell lines may be particularly useful in screening and evaluation of compounds that affect the endogenous activity of the described secreted protein products.

[0082] A number of selection systems may be used, including, but not limited to, the herpes simplex virus thymidine kinase (Wigler et al., Cell 11:223-232, 1977), hypoxanthine-guanine phosphoribosyltransferase (Szybalska and Szybalski, Proc. Natl. Acad. Sci. USA 48:2026-2034, 1962), and adenine phosphoribosyltransferase (Lowy et al., Cell 22:817-823, 1980) genes, which can be employed in tk⁻, hgprt⁻ or aprt⁻ cells, respectively. Also, antimetabolite resistance can be used as the basis of selection for the following genes: dihydrofolate reductase (dhfr), which confers resistance to methotrexate (Wigler et al., Proc. Natl. Acad. Sci. USA 77:3567-3570, 1980, and O'Hare et al., Proc. Natl. Acad. Sci. USA 78:1527-1531, 1981); guanine phosphoribosyl transferase (gpt), which confers resistance to mycophenolic acid (Mulligan and Berg, Proc. Natl. Acad. Sci. USA 78:2072-2076, 1981); neomycin phosphotransferase (neo), which confers resistance to G-418 (Colbere-Garapin et al., J. Mol. Biol. 150:1-14, 1981); and hygromycin B phosphotransferase (hpt), which confers resistance to hygromycin (Santerre et al., Gene 30:147-156, 1984).

[0083] Alternatively, any fusion protein can be readily purified by utilizing an antibody specific for the fusion protein being expressed. Another exemplary system allows for the ready purification of non-denatured fusion proteins expressed in human cell lines (Janknecht et al., Proc. Natl. Acad. Sci. USA 88:8972-8976, 1991). In this system, the sequence of interest is subcloned into a vaccinia recombination plasmid such that the sequence's open reading frame is translationally fused to an amino-terminal tag consisting of six histidine residues. Extracts from cells infected with recombinant vaccinia virus are loaded onto Ni²⁺-nitriloacetic acid-agarose columns, and histidine-tagged proteins are selectively eluted with imidazole-containing buffers.

[0084] Also encompassed by the present invention are fusion proteins that direct the described secreted proteins to a target organ and/or facilitate transport across the membrane into the cytosol. Conjugation of the described secreted proteins to antibody molecules or their Fab fragments could be used to target cells bearing a particular epitope. Attaching an appropriate signal sequence to the described secreted proteins would also transport the described secreted proteins to a desired location within the cell. Alternatively, targeting of the described secreted proteins or nucleic acid sequences might be achieved using liposome or lipid complex based delivery systems. Such technologies are described in “Liposomes: A Practical Approach” (New, R.R. C., ed., IRL Press, New York; NY, 1990), and in U.S. Pat. Nos. 4,594,595, 5,459,127, 5,948,767 and 6,110,490. Additionally embodied are novel protein constructs engineered in such a way that they facilitate transport of the described secreted proteins to a target site or desired organ, where they cross the cell membrane and/or the nucleus, where the described secreted proteins can exert their functional activity. This goal may be achieved by coupling of the described secreted proteins to a cytokine or other ligand that provides targeting specificity, and/or to a protein transducing domain (see generally U.S. Provisional Patent Application Ser. Nos. 60/111,701 and 60/056,713, for examples of such transducing sequences), to facilitate passage across cellular membranes, and can optionally be engineered to include nuclear localization signals.

[0085] Additionally contemplated are oligopeptides that are modeled on an amino acid sequence first described in the Sequence Listing. Such secreted protein oligopeptides are generally between about 10 to about 100 amino acids long, or between about 16 to about 80 amino acids long, or between about 20 to about 35 amino acids long, or any variation or combination of sizes represented therein that incorporate a contiguous region of sequence first disclosed in the Sequence Listing. Such secreted protein oligopeptides can be of any length disclosed within the above ranges and can initiate at any amino acid position represented in the Sequence Listing.

[0086] The invention also contemplates “substantially isolated” or “substantially pure” proteins or polypeptides. By a “substantially isolated” or “substantially pure” protein or polypeptide is meant a protein or polypeptide that has been separated from at least some of those components that naturally accompany it. Typically, the protein or polypeptide is substantially isolated or pure when it is at least 60%, by weight, free from the proteins and other naturally-occurring organic molecules with which it is naturally associated in vivo. Preferably, the purity of the preparation is at least 75%, more preferably at least 90%, and most preferably at least 99%, by weight. A substantially isolated or pure protein or polypeptide may be obtained, for example, by extraction from a natural source, by expression of a recombinant nucleic acid encoding the protein or polypeptide, or by chemically synthesizing the protein or polypeptide.

[0087] Purity can be measured by any appropriate method, e.g., column chromatography such as immunoaffinity chromatography using an antibody specific for the protein or polypeptide, polyacrylamide gel electrophoresis, or HPLC analysis. A protein or polypeptide is substantially free of naturally associated components when it is separated from at least some of those contaminants that accompany it in its natural state. Thus, a polypeptide that is chemically synthesized or produced in a cellular system different from the cell from which it naturally originates will be, by definition, substantially free from its naturally associated components. Accordingly, substantially isolated or pure proteins or polypeptides include eukaryotic proteins synthesized in E. coli, other prokaryotes, or any other organism in which they do not naturally occur.

### 7.3 Antibodies to the Described Secreted Proteins

[0088] Antibodies that specifically recognize one or more epitopes of the described secreted proteins, epitopes of conserved variants of the described secreted proteins, or peptide fragments of the described secreted proteins, are also encompassed by the invention. Such antibodies include, but are not limited to, polyclonal antibodies, monoclonal antibodies (mAbs), humanized or chimeric antibodies, single chain antibodies, Fab fragments, F(ab′)₂ fragments, fragments produced by a Fab expression library, anti-idiotypic (anti-Id) antibodies, and epitope-binding fragments of any of the above.

[0089] The antibodies of the invention may be used, for example, in the detection of the described secreted proteins in a biological sample and may, therefore, be utilized as part of a diagnostic or prognostic technique whereby patients may be tested for abnormal amounts of the described secreted proteins. Such antibodies may also be utilized in conjunction with, for example, compound screening schemes for the evaluation of the effect of test compounds on expression and/or activity of the described secreted proteins. Additionally, such antibodies can be used in conjunction with gene therapy to, for example, evaluate normal and/or engineered secreted protein-expressing cells prior to their introduction into a patient. Such antibodies may additionally be used in methods for the inhibition of abnormal activity of the described secreted proteins. Thus, such antibodies may be utilized as a part of treatment methods.

[0090] For the production of antibodies, various host animals may be immunized by injection with the described secreted proteins, peptides (e.g., corresponding to a functional domain of the described secreted proteins), truncated polypeptides (the described secreted proteins in which one or more domains have been deleted), functional equivalents of the described secreted proteins or mutated variants of the described secreted proteins. Such host animals may include, but are not limited to, pigs, rabbits, mice, goats, and rats, to name but a few. Various adjuvants may be used to increase the immunological response, depending on the host species, including, but not limited to, Freund's adjuvant (complete and incomplete), mineral salts such as aluminum hydroxide or aluminum phosphate, chitosan, surface active substances such as lysolecithin, pluronic polyols, polyanions, peptides, oil emulsions, and potentially useful human adjuvants such as BCG (bacille Calmette-Guerin) and Corynebacterium parvum. Alternatively, the immune response could be enhanced by combination and/or coupling with molecules such as keyhole limpet hemocyanin, tetanus toxoid, diphtheria toxoid, ovalbumin, cholera toxin, or fragments thereof. Polyclonal antibodies are heterogeneous populations of antibody molecules derived from the sera of the immunized animals.

[0091] Monoclonal antibodies, which are homogeneous populations of antibodies to a particular antigen, can be obtained by any technique that provides for the production of antibody molecules by continuous cell lines in culture. These include, but are not limited to, the hybridoma technique (Kohler and Milstein, Nature 256:495-497, 1975, and U.S. Pat. No. 4,376,110), the human B-cell hybridoma technique (Kosbor et al., Immunology Today 4:72, 1983, and Cote et al., Proc. Natl. Acad. Sci. USA 80:2026-2030, 1983), and the EBV-hybridoma technique (Cote et al., in “Monoclonal Antibodies and Cancer Therapy”, Vol. 27, UCLA Symposia on Molecular and Cellular Biology, New Series, pp. 77-96 (Reisfeld and Sell, eds., Alan R. Liss, Inc. New York, N.Y., 1985)). Such antibodies may be of any immunoglobulin class, including IgG, IgM, IgE, IgA, and IgD, and any subclass thereof. The hybridomas producing the mAbs of this invention may be cultivated in vitro or in vivo. Production of high titers of mabs in vivo makes this the presently preferred method of production.

[0092] In addition, techniques developed for the production of “chimeric antibodies” (Morrison et al., Proc. Natl. Acad. Sci. USA 81:6851-6855, 1984, Neuberger et al., Nature 312:604-608, 1984, and Takeda et al., Nature 314:452-454, 1985) by splicing the genes from a mouse antibody molecule of appropriate antigen specificity together with genes from a human antibody molecule of appropriate biological activity can be used. A chimeric antibody is a molecule in which different portions are derived from different animal species, such as those having a variable region derived from a murine mAb and a human immunoglobulin constant region. Such technologies are described in U.S. Pat. Nos. 6,114,598, 6,075,181 and 5,877,397. Also encompassed by the present invention is the use of fully humanized monoclonal antibodies, as described in U.S. Pat. No. 6,150,584.

[0093] Alternatively, techniques described for the production of single chain antibodies (U.S. Pat. No. 4,946,778, Bird, Science 242:423-426, 1988, Huston et al., Proc. Natl. Acad. Sci. USA 85:5879-5883, 1988, and Ward et al., Nature 341:544-546, 1989) can be adapted to produce single chain antibodies against the described secreted protein expression products. Single chain antibodies are formed by linking the heavy and light chain fragments of the Fv region via an amino acid bridge, resulting in a single chain polypeptide.

[0094] Antibody fragments that recognize specific epitopes may be generated by known techniques. For example, such fragments include, but are not limited to: F(ab′)₂ fragments, which can be produced by pepsin digestion of an antibody molecule; and Fab fragments, which can be generated by reducing the disulfide bridges of F(ab′)₂ fragments. Alternatively, Fab expression libraries may be constructed (Huse et al., Science 246:1275-1281, 1989) to allow rapid and easy identification of monoclonal Fab fragments with the desired specificity.

[0095] Antibodies to the described secreted proteins can, in turn, be utilized to generate anti-idiotype antibodies that “mimic” the described secreted proteins, using techniques well-known to those skilled in the art (see, e.g., Greenspan and Bona, FASEB J. 7:437-444, 1993, and Nisonoff, J. Immunol. 147:2429-2438, 1991). For example, antibodies that bind to a domain of the described secreted proteins and competitively inhibit the binding of the described secreted proteins to their cognate receptors can be used to generate anti-idiotypes that “mimic” the described secreted proteins and, therefore, bind and activate or neutralize a receptor. Such anti-idiotypic antibodies, or Fab fragments of such anti-idiotypes, can be used in therapeutic regimens involving a signaling pathway involving the described secreted proteins.

[0096] Additionally given the high degree of relatedness of mammalian proteins, the described secreted proteins knock-out mice (having never seen the described secreted proteins, and thus never been tolerized to the described secreted proteins) have an unique utility, as they can be advantageously applied to the generation of antibodies against the disclosed mammalian secreted proteins (i.e., the described secreted proteins will be immunogenic in the described secreted proteins knock-out animals).

[0097] The present invention is not to be limited in scope by the specific embodiments described herein, which are intended as single illustrations of individual aspects of the invention, and functionally equivalent methods and components are within the scope of the invention. Indeed, various modifications of the invention, in addition to those shown and described herein, will become apparent to those skilled in the art from the foregoing description. Such modifications are intended to fall within the scope of the appended claims. All cited publications, patents, and patents applications, are herein incorporated by reference in their entirety.

The application's sequence listing, which the Patent Office published only in electronic form, follows.

SEQUENCE LISTING (136 sequences)

SEQ ID NO: 1 - DNA, 1491 bp, Homo sapiens
  CDS (1)...(1491)
atgagctgcgtcctgggtggtgtcatccccttggggctgctgttcctggtctgcggatcccaaggctacctcctgcccaacgtcactctcttagaggagctgctcagcaaataccagcacaacgagtctcactcccgggtccgcagagccatccccagggaggacaaggaggagatcctcatgctgcacaacaagcttcggggccaggtgcagcctcaggcctccaacatggagtacatgacctgggatgacgaactggagaagtctgctgcagcgtgggccagtcagtgcatctgggagcacgggcccaccagtctgctggtgtccatcgggcagaacctgggcgctcactggggcaggtatcgctctccggggttccatgtgcagtcctggtatgacgaggtgaaggactacacctacccctacccgagcgagtgcaacccctggtgtccagagaggtgctcggggcctatgtgcacgcactacacacagatagtttgggccaccaccaacaagatcggttgtgctgtgaacacctgccggaagatgactgtctggggagaagtttgggagaacgcggtctactttgtctgcaattattctccaaaggggaactggattggagaagccccctacaagaatggccggccctgctctgagtgcccacccagctatggaggcagctgcaggaacaacttgtgttaccgagaagaaacctacactccaaaacctgaaacggacgagatgaatgaggtggaaacggctcccattcctgaagaaaaccatgtttggctccaaccgagggtgatgagacccaccaagcccaagaaaacctctgcggtcaactacatgacccaagtcgtcagatgtgacaccaagatgaaggacaggtgcaaagggtccacgtgtaacaggtaccagtgcccagcaggctgcctgaaccacaaggcgaagatctttggaagtctgttctatgaaagctcgtctagcatatgccgcgccgccatccactacgggatcctggatgacaagggaggcctggtggatatcaccaggaacgggaaggtccccttcttcgtgaagtctgagagacacggcgtgcagtccctcagcaaatacaaaccttccagctcattcatggtgtcaaaagtgaaagtgcaggatttggactgctacacgaccgttgctcagctgtgcccgtttgaaaagccagcaactcactgcccaagaatccattgtccggcacactgcaaagacgaaccttcctactgggctccggtgtttggaaccaacatctatgcagatacctcaagcatctgcaagacagctgtgcacgcgggagtcatcagcaacgagagtgggggtgacgtggacgtgatgcccgtggataaaaagaagacctacgtgggctcgctcaggaatggagttcagtctgaaagcctggggactcctcgggatggaaaggccttccggatctttgctgtcaggcag

SEQ ID NO: 2 - protein, 497 aa, Homo sapiens [sequence omitted]

SEQ ID NO: 3 - DNA, 2272 bp, Homo sapiens
cccagggcgtctccggctgctcccattgagctgtctgctcgctgtgcccgctgtgcctgctgtgcccgcgctgtcgccgctgctaccgcgtctgctggacgcgggagacgccagcgagctggtgattggagccctgcggagagctcaagcgcccagctctgcccsaggagcccaggctgccccgtgagtcccatagttgctgcaggagtggagccatgagctgcgtcctgggtggtgtcatccccttggggctgctgttcctggtctgcggatcccaaggctacctcctgcccaacgtcactctcttagaggagctgctcagcaaataccagcacaacgagtctcactcccgggtccgcagagccatccccagggaggacaaggaggagatcctcatgctgcacaacaagcttcggggccaggtgcagcctcaggcctccaacatggagtacatgacctgggatgacgaactggagaagtctgctgcagcgtgggccagtcagtgcatctgggagcacgggcccaccagtctgctggtgtccatcgggcagaacctgggcgctcactggggcaggtatcgctctccggggttccatgtgcagtcctggtatgacgaggtgaaggactacacctacccctacccgagcgagtgcaacccctggtgtccagagaggtgctcggggcctatgtgcacgcactacacacagatagtttgggccaccaccaacaagatcggttgtgctgtgaacacctgccggaagatgactgtctggggagaagtttgggagaacgcggtctactttgtctgcaattattctccaaaggggaactggattggagaagccccctacaagaatggccggccctgctctgagtgcccacccagctatggaggcagctgcaggaacaacttgtgttaccgagaagaaacctacactccaaaacctgaaacggacgagatgaatgaggtggaaacggctcccattcctgaagaaaaccatgtttggctccaaccgagggtgatgagacccaccaagcccaagaaaacctctgcggtcaactacatgacccaagtcgtcagatgtgacaccaagatgaaggacaggtgcaaagggtccacgtgtaacaggtaccagtgcccagcaggctgcctgaaccacaaggcgaagatctttggaagtctgttctatgaaagctcgtctagcatatgccgcgccgccatccactacgggatcctggatgacaagggaggcctggtggatatcaccaggaacgggaaggtccccttcttcgtgaagtctgagagacacggcgtgcagtccctcagcaaatacaaaccttccagctcattcatggtgtcaaaagtgaaagtgcaggatttggactgctacacgaccgttgctcagctgtgcccgtttgaaaagccagcaactcactgcccaagaatccattgtccggcacactgcaaagacgaaccttcctactgggctccggtgtttggaaccaacatctatgcagatacctcaagcatctgcaagacagctgtgcacgcgggagtcatcagcaacgagagtgggggtgacgtggacgtgatgcccgtggataaaaagaagacctacgtgggctcgctcaggaatggagttcagtctgaaagcctggggactcctcgggatggaaaggccttccggatctttgctgtcaggcagtgaatttccagcaccaggggagaaggggcgtcttcaggagggcttcggggttttgcttttatttttattttgtcattgcggggtatatggagagtcaggaaacttcctttgactgatgttcagtgtccatcactttgtggcctgtgggtgaggtgacatctcatcccctcactgaagcaacagcatcccaaggtgctcagccggactccctggtgcctgatcctgctggggcctgggggtctccatctggacgtcctctctcctttagagatctgagctgtctcttaaaggggacagttgcccaaaatgttccttgctatgtgttcttctgttggtggaggaagttgatttcaacccccctgccaaaagaacaaaccatttgaagctcacaattgtgaagcattcacggcgtcggaagaggccttttgagcaagcgccaatgagtttcaggaatgaagtagaaggtagttatttaaaaataaaaaacacagtccgtccctaccaatagaggaaaatggttttaatgtttgctggtcagacagacaaatgggctagagtaagaaggc

SEQ ID NO: 4 - DNA, 426 bp, Homo sapiens
  CDS (1)...(426)
atggctcctccctccgtccccctggtcctcctcctcgtcctcttgctgagcctggcagagactccagcatccgcacctgcccaccggggacgaggaggctggaccctcaatagtgctggctaccttctgggtcccgtcctccaccttccccaaatgggtgaccaagacggaaagagggagacagcccttgagatcctagacctgtggaaggccatcgatgggctcccctactcccaccctccacagccctccaagaggaatgtgatggagacgtttgccaaaccagagattggaggtaaagccaggaaacacagaagagagacaccgacaggagagggggaacaaggaagtggcaggcagagcttagaggatctgggcatgctcagcatgaaaattcccaaggaggaagatgtcctgaagtcatag

SEQ ID NO: 5 - protein, 141 aa, Homo sapiens
MAPPSVPLVLLLVLLLSLAETPASAPAHRGRGGWTLNSAGYLLGPVLHLPQMGDQDGKRETALEILDLWKAIDGLPYSHPPQPSKRNVMETFAKPEIGGKARKHRRETPTGEGEQGSGRQSLEDLGMLSMKIPKEEDVLKS

SEQ ID NO: 6 - DNA, 351 bp, Homo sapiens
  CDS (1)...(351)
atggctcctccctccgtccccctggtcctcctcctcgtcctcttgctgagcctggcagagactccagcatccgcacctgcccaccggggacgaggaggctggaccctcaatagtgctggctaccttctgggtcccgtcctccaccttccccaaatgggtgaccaagacggaaagagggagacagcccttgagatcctagacctgtggaaggccatcgatgggctcccctactcccaccctccacagccctccaagaggaatgtgatggagacgtttgccaaaccagagattggagatctgggcatgctcagcatgaaaattcccaaggaggaagatgtcctgaagtcatag

SEQ ID NO: 7 - protein, 116 aa, Homo sapiens
MAPPSVPLVLLLVLLLSLAETPASAPAHRGRGGWTLNSAGYLLGPVLHLPQMGDQDGKRETALEILDLWKAIDGLPYSHPPQPSKRNVMETFAKPEIGDLGMLSMKIPKEEDVLKS

SEQ ID NO: 8 - DNA, 1356 bp, Homo sapiens
  CDS (1)...(1356)
atggttcccgaggtgagggtcctctcctccttgctgggactcgcgctgctctggttccccctggactcccacgctcgagcccgcccagacatgttctgccttttccatgggaagagatactcccccggcgagagctggcacccctacttggagccacaaggcctgatgtactgcctgcgctgtacctgctcagagggcgcccatgtgagttgttaccgcctccactgtccgcctgtccactgcccccagcctgtgacggagccacagcaatgctgtcccaagtgtgtggaacctcacactccctctggactccgggccccaccaaagtcctgccagcacaacgggaccatgtaccaacacggagagatcttcagtgcccatgagctgttcccctcccgcctgcccaaccagtgtgtcctctgcagctgcacagagggccagatctactgcggcctcacaacctgccccgaaccaggctgcccagcacccctcccrctgccagactcctgctgccargcctgcaaagatgaggcaagtgagcaatcggatgaagaggacagtgtgcagtcgctccatggggtgagacatcctcaggatccatgttccagtgatgctgggagaaagagaggcccgggcaccccagcccccactggcctcagcgcccctctgagcttcatccctcgccacttcagacccaagggagcaggcagcacaactgtcaagatcgtcctgaaggagaaacataagaaagcctgtgtgcatggcgggaagacgtactcccacggggaggtgtggcacccggccttccgtgccttcggccccttgccctgcatcctatgcacctgtgaggatggccgccaggactgccagcgtgtgacctgtcccaccgagtacccctgccgtcaccccgagaaagtggctgggaagtgctgcaagatttgcccagaggacaaagcagaccctggccacagtgagatcagttctaccaggtgtcccaaggcaccgggccgggtcctcgtccacacatcggtatccccaagcccagacaacctgcgtcgctttgccctggaacacgaggcctcggacttggtggagatctacctctggaagctggtraaagatgaggaaactgaggctcagagaggtgaagtacctggcccaaggccacacagccagaatcttccacttgactcagatcaagaaagtcaggaagcaagacttccagaaagaggcacagcacttccgactgctcgctggcccccacgaaggtcactggaacgtcttcctagcccagaccctggagctgaaggtcacggccagtccagacaaagtgaccaagacataacaaagacctaa

SEQ ID NO: 9 - protein, 451 aa, Homo sapiens
  VARIANT (1)...(451): Xaa = Any Amino Acid
MVPEVRVLSSLLGLALLWFPLDSHARARPDMFCLFHGKRYSPGESWHPYLEPQGLMYCLRCTCSEGAHVSCYRLHCPPVHCPQPVTEPQQCCPKCVEPHTPSGLRAPPKSCQHNGTMYQHGEIFSAHELFPSRLPNQCVLCSCTEGQIYCGLTTCPEPGCPAPLXLPDSCCQACKDEASEQSDEEDSVQSLHGVRHPQDPCSSDAGRKRGPGTPAPTGLSAPLSFIPRHFRPKGAGSTTVKIVLKEKHKKACVHGGKTYSHGEVWHPAFRAFGPLPCILCTCEDGRQDCQRVTCPTEYPCRHPEKVAGKCCKICPEDKADPGHSEISSTRCPKAPGRVLVHTSVSPSPDNLRRFALEHEASDLVEIYLWKLXKDEETEAQRGEVPGPRPHSQNLPLDSDQESQEARLPERGTALPTARWPPRRSLERLPSPDPGAEGHGQSRQSDQDITKT

SEQ ID NO: 10 - DNA, 1290 bp, Homo sapiens
  CDS (1)...(1290)
atggttcccgaggtgagggtcctctcctccttgctgggactcgcgctgctctggttccccctggactcccacgctcgagcccgcccagacatgttctgccttttccatgggaagagatactcccccggcgagagctggcacccctacttggagccacaaggcctgatgtactgcctgcgctgtacctgctcagagggcgcccatgtgagttgttaccgcctccactgtccgcctgtccactgcccccagcctgtgacggagccacagcaatgctgtcccaagtgtgtggaacctcacactccctctggactccgggccccaccaaagtcctgccagcacaacgggaccatgtaccaacacggagagatcttcagtgcccatgagctgttcccctcccgcctgcccaaccagtgtgtcctctgcagctgcacagagggccagatctactgcggcctcacaacctgccccgaaccaggctgcccagcacccctcccrctgccagactcctgctgccargcctgcaaagatgaggcaagtgagcaatcggatgaagaggacagtgtgcagtcgctccatggggtgagacatcctcaggatccatgttccagtgatgctgggagaaagagaggcccgggcaccccagcccccactggcctcagcgcccctctgagcttcatccctcgccacttcagacccaagggagcaggcagcacaactgtcaagatcgtcctgaaggagaaacataagaaagcctgtgtgcatggcgggaagacgtactcccacggggaggtgtggcacccggccttccgtgccttcggccccttgccctgcatcctatgcacctgtgaggatggccgccaggactgccagcgtgtgacctgtcccaccgagtacccctgccgtcaccccgagaaagtggctgggaagtgctgcaagatttgcccagaggacaaagcagaccctggccacagtgagatcagttctaccaggtgtcccaaggcaccgggccgggtcctcgtccacacatcggtatccccaagcccagacaacctgcgtcgctttgccctggaacacgaggcctcggacttggtggagatctacctctggaagctggtraaaggaatcttccacttgactcagatcaagaaagtcaggaagcaagacttccagaaagaggcacagcacttccgactgctcgctggcccccacgaaggtcactggaacgtcttcctagcccagaccctggagctgaaggtcacggccagtccagacaaagtgaccaagacataa

SEQ ID NO: 11 - protein, 429 aa, Homo sapiens
  VARIANT (1)...(429): Xaa = Any Amino Acid
MVPEVRVLSSLLGLALLWFPLDSHARARPDMFCLFHGKRYSPGESWHPYLEPQGLMYCLRCTCSEGAHVSCYRLHCPPVHCPQPVTEPQQCCPKCVEPHTPSGLRAPPKSCQHNGTMYQHGEIFSAHELFPSRLPNQCVLCSCTEGQIYCGLTTCPEPGCPAPLXLPDSCCQACKDEASEQSDEEDSVQSLHGVRHPQDPCSSDAGRKRGPGTPAPTGLSAPLSFIPRHFRPKGAGSTTVKIVLKEKHKKACVHGGKTYSHGEVWHPAFRAFGPLPCILCTCEDGRQDCQRVTCPTEYPCRHPEKVAGKCCKICPEDKADPGHSEISSTRCPKAPGRVLVHTSVSPSPDNLRRFALEHEASDLVEIYLWKLXKGIFHLTQIKKVRKQDFQKEAQHFRLLAGPHEGHWNVFLAQTLELKVTASPDKVTKT

SEQ ID NO: 12 - DNA, 1792 bp, Homo sapiens
gccttgcccggcgctgcgcgctcggcagacgccggtcctctccctgctttctcctcctctccctctcaccttccccctttctttgatcgcctctcccttctgctggaccttccttcgtctctccatctctccctcctttccccgcgttctctttccacctttctcttcttcccaccttagacctcccttcctgccctcctttcctgcccaccgctgcttcctggcccttctccgaccccgctctagcagcagacctcctggggtctgtgggttgatctgtggcccctgtgcctccgtgtccttttcgtctcccttcctcccgactccgctcccggaccagcggcctgaccctggggaaaggatggttcccgaggtgagggtcctctcctccttgctgggactcgcgctgctctggttccccctggactcccacgctcgagcccgcccagacatgttctgccttttccatgggaagagatactcccccggcgagagctggcacccctacttggagccacaaggcctgatgtactgcctgcgctgtacctgctcagagggcgcccatgtgagttgttaccgcctccactgtccgcctgtccactgcccccagcctgtgacggagccacagcaatgctgtcccaagtgtgtggaacctcacactccctctggactccgggccccaccaaagtcctgccagcacaacgggaccatgtaccaacacggagagatcttcagtgcccatgagctgttcccctcccgcctgcccaaccagtgtgtcctctgcagctgcacagagggccagatctactgcggcctcacaacctgccccgaaccaggctgcccagcacccctcccgctgccagactcctgctgccaagcctgcaaagatgaggcaagtgagcaatcggatgaagaggacagtgtgcagtcgctccatggggtgagacatcctcaggatccatgttccagtgatgctgggagaaagagaggcccgggcaccccagcccccactggcctcagcgcccctctgagcttcatccctcgccacttcagacccaagggagcaggcagcacaactgtcaagatcgtcctgaaggagaaacataagaaagcctgtgtgcatggcgggaagacgtactcccacggggaggtgtggcacccggccttccgtgccttcggccccttgccctgcatcctatgcacctgtgaggatggccgccaggactgccagcgtgtgacctgtcccaccgagtacccctgccgtcaccccgagaaagtggctgggaagtgctgcaagatttgcccagaggacaaagcagaccctggccacagtgagatcagttctaccaggtgtcccaaggcaccgggccgggtcctcgtccacacatcggtatccccaagcccagacaacctgcgtcgctttgccctggaacacgaggcctcggacttggtggagatctacctctggaagctggtaaaagatgaggaaactgaggctcagagaggtgaagtacctggcccaaggccacacagccagaatcttccacttgactcagatcaagaaagtcaggaagcaagacttccagaaagaggcacagcacttccgactgctcgctggcccccacgaaggtcactggaacgtcttcctagcccagaccctggagctgaaggtcacggccagtccagacaaagtgaccaagacataacaaagacctaacagttgcagatatgagctgtataattgttgttattatatattaataaataagaagttgcattaccctcaaaaaaa

SEQ ID NO: 13 - DNA, 918 bp, Homo sapiens
  CDS (1)...(918)
atgagcctcttcgggcttctcctgctgacatctgccctggccggccagagacaggggactcaggcggaatccaacctgagtagtaaattccagttttccagcaacaaggaacagaacggagtacaagatcctcagcatgagagaattattactgtgtctactaatggaagtattcacagcccaaggtttcctcatacttatccaagaaatacggtcttggtatggagattagtagcagtagaggaaaatgtatggatacaacttacgtttgatgaaagatttgggcttgaagacccagaagatgacatatgcaagtatgattttgtagaagttgaggaacccagtgatggaactatattagggcgctggtgtggttctggtactgtaccaggaaaacagatttctaaaggaaatcaaattaggataagatttgtatctgatgaatattttccttctgaaccagggttctgcatccactacaacattgtcatgccacaattcacagaagctgtgagtccttcagtgctacccccttcagctttgccactggacctgcttaataatgctataactgcctttagtaccttggaagaccttattcgatatcttgaaccagagagatggcagttggacttagaagatctatataggccaacttggcaacttcttggcaaggcttttgtttttggaagaaaatccagaggagataattatgaaaaggaaaaaaatctgaagaccaacttttacaaatatttggcagagggaaacttctttaatattattatagttaagctattcaaaaagtatcctttggtacattatctttctttcttcttttcctttttctctttatttgccttccccccccaaaagtactatacaatgtttcaagaatgtatgacatatgacttaacttaa

SEQ ID NO: 14 - protein, 305 aa, Homo sapiens
MSLFGLLLLTSALAGQRQGTQAESNLSSKFQFSSNKEQNGVQDPQHERIITVSTNGSIHSPRFPHTYPRNTVLVWRLVAVEENVWIQLTFDERFGLEDPEDDICKYDFVEVEEPSDGTILGRWCGSGTVPGKQISKGNQIRIRFVSDEYFPSEPGFCIHYNIVMPQFTEAVSPSVLPPSALPLDLLNNAITAFSTLEDLIRYLEPERWQLDLEDLYRPTWQLLGKAFVFGRKSRGDNYEKEKNLKTNFYKYLAEGNFFNIIIVKLFKKYPLVHYLSFFFSFFSLFAFPPQKYYTMFQECMTYDLT

SEQ ID NO: 15 - DNA, 2991 bp, Homo sapiens
  CDS (1)...(2991)
atgaagattttgatacttggtatttttctgtttttatgtagttctccaggttgggcaatagataggcactgctacataggcattgaagaaagcatttggaactatgctccttctggtaaaaatatgctcaatgaaaagcctttttctgaagacctagaatttctacaaggaggtcaagcgaggaagagctttgtttttaaaaaggctttgtattttcaatatactgataatacatttcaaaggatcattgaaaaaccatcctggttgggatttttaggtccaatgattaaagcagagactggagacttcatttatgtacatgtaaaaaataatgcttcaagagcttatagttatcatcctcatgggctcacctactccaaagaaaatgaagcacatggtgctatctatcctgataatacgacaggcctgcaaaaggaagttgaatatctggagccagggaaacaatatacctacaagtggtatgtagaagaacatcagggacctggccccaatgacagtaattgtgtgacaagaatttaccattcccatatagacactgcaagagatgtagcttcgggacttattggaccaatactgacttgtaaaagagggacactgaatggagacactgaaaaagatattgacaggtcttcttttctgatgttttctacaactgatgaaagcagaagctggtatagtgatgaaaatattcgtgcatttactgaatctggcaagattaatactagtgatccccgttttgaggagagcatgagcatgcaatcaataaatggatacatctatggaaatctgcccaatctcaccatgtgtgctgaagatagggtccagtggtattttgttggcatgggtggcgtggctgacatacaccccgtctacctccgcggacaaactctgatctctcggaatcacagaaaggacaccattatgctcttcccctcctcactggaagatgccttcatggtggccaaggcccctggagtgtggatgctgggatgccagatacatgagagtatgcaggcatttttcaaagtaagtaattgccagaaaccttcaacagaagcctttgttactgggacacatgttatacattactatattgctgctaaagaaattctttggaactatgctccatctggtatagatttcttcactaaaaaaaatttaacagcagctggaagtaaatcccagttattttttgaacgaagtccaaccagaattggaggaacttacaaaaaactgatttaccgtgaatacacagatgcttccttccaaacacagaaggcaagagaagaacaccttggaatccttggccccgtttttaaggcagaggtgggacagaccatcaaaatcactttctataacaatgcttccctgccactcagcattcagcctcctggactgcattacaacaagagcaatgagggcttattctacgaaacacctggaggaagtacccctccaccctcttcacatgtaagtcctggcacaacatttgtctatacatgggaagttccaaaagatgtgggtcccacctccacagatcccaactgcttgacctggttctattactcttcagtaaatgggaaaaaagacatcaacagtggccttctggggcctctccttatatgtagaaatggaagtcttggagacgatggcaaacagaaaggagtagacaaagagttttacctacttgccacaatatttgatgaaaatgaaagtaatctcttggatgaaaatrtcagaacatttatcacagagcctgaaaacatagataaagaggatacagactgccaagcctcaaataagatgtactccataaatggatacatgtatggaaatctgcctggattggacacgtgcttaggagacaacgttttgtggcacgtttttagtgtaggatcagtggaagatttacacgggatatatttttcaggaaataccttcacttctttaggagcaagaagggacacaatacctatgtttccttatacttctcagacgcttttgatgacacctgattctataggaacttttgatttggtttgcatgacaataaagcacaatctaggaggcatgaaacataaatatcacgtgaggcaatgtgggaagccaaaccctgatcaaacacaataccaggaggagaaaataattattaccattgcagccgaggaaatggaatgggattattctcctagtagaaagtgggagaatgaactccaccacttacgaagagagaaccaaacgagcatgtatgtggacagaagtggaacacttcttgggtccaaatacaagaaagtcttatatcgtcaatatgatgataacacgttcacaaatcaaacaaaaaggaatgaaggtgaaaaacatctcgatatactaggtccattaatattgctcaaccctggtcaaataattcaaattatctttaaaaataaagccgcaagaccgtattctattcatgctcatggagtgaaaacaaataattccactgttgttccaactcagccaggagagattcaaatatatacttggcagatacctgatagaactggtcctacctcactggactttgaatgcataccttggttttactattcaactgtatctgtggctaaggaccttcacagtggactggtaggccctctctctgtatgccgcaaagacatcaaccccaacatagttcaccgtgttctccacttcatgatatttgatgagaatgaatcctggtacttcgaagacagtatcaacacctatgcttcaaaaccaaacaaagtggacaaggaaaatgataattttcaactcagcaaccaaatgcacgcaattaacggaagactgtttggaaataaccaaggtataacattccatgttggggatgtagtgaattggtatctgattggcatagggaatgaagctgacctgcacacagttcactttcatggccatagctttgaatacaagcataaatatttgatatga

SEQ ID NO: 16 - protein, 996 aa, Homo sapiens
  VARIANT (1)...(996): Xaa = Any Amino Acid
MKILILGIFLFLCSSPGWAIDRHCYIGIEESIWNYAPSGKNMLNEKPFSEDLEFLQGGQARKSFVFKKALYFQYTDNTFQRIIEKPSWLGFLGPMIKAETGDFIYVHVKNNASRAYSYHPHGLTYSKENEAHGAIYPDNTTGLQKEVEYLEPGKQYTYKWYVEEHQGPGPNDSNCVTRIYHSHIDTARDVASGLIGPILTCKRGTLNGDTEKDIDRSSFLMFSTTDESRSWYSDENIRAFTESGKINTSDPRFEESMSMQSINGYIYGNLPNLTMCAEDRVQWYFVGMGGVADIHPVYLRGQTLISRNHRKDTIMLFPSSLEDAFMVAKAPGVWMLGCQIHESMQAFFKVSNCQKPSTEAFVTGTHVIHYYIAAKEILWNYAPSGIDFFTKKNLTAAGSKSQLFFERSPTRIGGTYKKLIYREYTDASFQTQKAREEHLGILGPVFKAEVGQTIKITFYNNASLPLSIQPPGLHYNKSNEGLFYETPGGSTPPPSSHVSPGTTFVYTWEVPKDVGPTSTDPNCLTWFYYSSVNGKKDINSGLLGPLLICRNGSLGDDGKQKGVDKEFYLLATIFDENESNLLDENXRTFITEPENIDKEDTDCQASNKMYSINGYMYGNLPGLDTCLGDNVLWHVFSVGSVEDLHGIYFSGNTFTSLGARRDTIPMFPYTSQTLLMTPDSIGTFDLVCMTIKHNLGGMKHKYHVRQCGKPNPDQTQYQEEKIIITIAAEEMEWDYSPSRKWENELHHLRRENQTSMYVDRSGTLLGSKYKKVLYRQYDDNTFTNQTKRNEGEKHLDILGPLILLNPGQIIQIIFKNKAARPYSIHAHGVKTNNSTVVPTQPGEIQIYTWQIPDRTGPTSLDFECIPWFYYSTVSVAKDLHSGLVGPLSVCRKDINPNIVHRVLHFMIFDENESWYFEDSINTYASKPNKVDKENDNFQLSNQMHAINGRLFGNNQGITFHVGDVVNWYLIGIGNEADLHTVHFHGHSFEYKHKYLI

SEQ ID NO: 17 - DNA, 765 bp, Homo sapiens
  CDS (1)...(765)
atgcaaatgggaagatttcttctcttagtaattttatttctgccacgtgagatgacaagttctgttttaactgtgaatggtaaaactgagaactatatcctggatactacacctggctcccaagcatctctgatatgtgctgttcaaaaccacaccagagaggaagaactgctctggtaccgagaggaggggagagtggatttgaaatctgsaaacaamatcaattccagctctgtctgtgtctcttccatcagtgaaaatgacaacggaatcagctttacctgcaggctggggagggatcagtccgtgtccgtttcggtggtgctgaatgttacttttcctcctctcctaagtggaaacgacttccaaacagttgaggaaggcagtaatgtgaagttggtttgcaatgtgaaagccaacccccaggctcaaatgatgtggtacaaaaacagtagtctcctcgatttagagaaaagccgtcaccaaatccaacagacaagtgagtcttttcagctgtcaatcaccaaagtcgagaagcctgacaacggaacctacagttgtattgcaaagtcatctctgaaaacggagagcttggactttcacctgattgttaaagataaaactgtgggtgtaccaatagagcccattattgctgcatgtgttgtgatctttctgacattgtgctttggactgattgctagaagaaagaaaataatgaagctctgcatgaaggataaagaccctcacagtgaaacagctctatga

SEQ ID NO: 18 - protein, 254 aa, Homo sapiens
  VARIANT (1)...(254): Xaa = Any Amino Acid
MQMGRFLLLVILFLPREMTSSVLTVNGKTENYILDTTPGSQASLICAVQNHTREEELLWYREEGRVDLKSXNXINSSSVCVSSISENDNGISFTCRLGRDQSVSVSVVLNVTFPPLLSGNDFQTVEEGSNVKLVCNVKANPQAQMMWYKNSSLLDLEKSRHQIQQTSESFQLSITKVEKPDNGTYSCIAKSSLKTESLDFHLIVKDKTVGVPIEPIIAACVVIFLTLCFGLIARRKKIMKLCMKDKDPHSETAL

SEQ ID NO: 19 - DNA, 633 bp, Homo sapiens
  CDS (1)...(633)
atgcaaatgggaagatttcttctcttagtaattttatttctgccacgtgagatgacaagttctgttttaactgtgaatggtaaaactgagaactatatcctggatactacacctggctcccaagcatctctgatatgtgctgttcaaaaccacaccagagaggaagaactgctctggtaccgagaggaggggagagtggatttgaaatctgsaaacaamatcaattccagctctgtctgtgtctcttccatcagtgaaaatgacaacggaatcagctttacctgcaggctggggagggatcagtccgtgtccgtttcggtggtgctgaatgttacttttcctcctctcctaagtggaaacgacttccaaacagttgaggaaggcagtaatgtgaagttggtttgcaatgtgaaagccaacccccaggctcaaatgatgtggtacaaaaacagtagtctcctcgatttagagaaaagccgtcaccaaatccaacagacaagtgagtcttttcagctgtcaatcaccaaagtcgagaagcctgacaacggaacctacagttgtattgcaaagtcatctctgaaaacggagagcttggactttcacctgattgttaaagctctgcatgaaggataa

SEQ ID NO: 20 - protein, 210 aa, Homo sapiens
  VARIANT (1)...(210): Xaa = Any Amino Acid
MQMGRFLLLVILFLPREMTSSVLTVNGKTENYILDTTPGSQASLICAVQNHTREEELLWYREEGRVDLKSXNXINSSSVCVSSISENDNGISFTCRLGRDQSVSVSVVLNVTFPPLLSGNDFQTVEEGSNVKLVCNVKANPQAQMMWYKNSSLLDLEKSRHQIQQTSESFQLSITKVEKPDNGTYSCIAKSSLKTESLDFHLIVKALHEG

SEQ ID NO: 21 - DNA, 789 bp, Homo sapiens
  CDS (1)...(789)
atggcatggaagagcagtgtcataatgcaratgggaagatttcttctcttagtaattttatttctgccacgtgagatgacaagttctgttttaactgtgaatggtaaaactgagaactatatcctggatactacacctggctcccaagcatctctgatatgtgctgttcaaaaccacaccagagaggaagaactgctctggtaccgagaggaggggagagtggatttgaaatctgsaaacaamatcaattccagctctgtctgtgtctcttccatcagtgaaaatgacaacggaatcagctttacctgcaggctggggagggatcagtccgtgtccgtttcggtggtgctgaatgttacttttcctcctctcctaagtggaaacgacttccaaacagttgaggaaggcagtaatgtgaagttggtttgcaatgtgaaagccaacccccaggctcaaatgatgtggtacaaaaacagtagtctcctcgatttagagaaaagccgtcaccaaatccaacagacaagtgagtcttttcagctgtcaatcaccaaagtcgagaagcctgacaacggaacctacagttgtattgcaaagtcatctctgaaaacggagagcttggactttcacctgattgttaaagataaaactgtgggtgtaccaatagagcccattattgctgcatgtgttgtgatctttctgacattgtgctttggactgattgctagaagaaagaaaataatgaagctctgcatgaaggataaagaccctcacagtgaaacagctctatga

SEQ ID NO: 22 - protein, 262 aa, Homo sapiens
  VARIANT (1)...(262): Xaa = Any Amino Acid
MAWKSSVIMQMGRFLLLVILFLPREMTSSVLTVNGKTENYILDTTPGSQASLICAVQNHTREEELLWYREEGRVDLKSXNXINSSSVCVSSISENDNGISFTCRLGRDQSVSVSVVLNVTFPPLLSGNDFQTVEEGSNVKLVCNVKANPQAQMMWYKNSSLLDLEKSRHQIQQTSESFQLSITKVEKPDNGTYSCIAKSSLKTESLDFHLIVKDKTVGVPIEPIIAACVVIFLTLCFGLIARRKKIMKLCMKDKDPHSETAL

SEQ ID NO: 23 - DNA, 657 bp, Homo sapiens
  CDS (1)...(657)
atggcatggaagagcagtgtcataatgcaratgggaagatttcttctcttagtaattttatttctgccacgtgagatgacaagttctgttttaactgtgaatggtaaaactgagaactatatcctggatactacacctggctcccaagcatctctgatatgtgctgttcaaaaccacaccagagaggaagaactgctctggtaccgagaggaggggagagtggatttgaaatctgsaaacaamatcaattccagctctgtctgtgtctcttccatcagtgaaaatgacaacggaatcagctttacctgcaggctggggagggatcagtccgtgtccgtttcggtggtgctgaatgttacttttcctcctctcctaagtggaaacgacttccaaacagttgaggaaggcagtaatgtgaagttggtttgcaatgtgaaagccaacccccaggctcaaatgatgtggtacaaaaacagtagtctcctcgatttagagaaaagccgtcaccaaatccaacagacaagtgagtcttttcagctgtcaatcaccaaagtcgagaagcctgacaacggaacctacagttgtattgcaaagtcatctctgaaaacggagagcttggactttcacctgattgttaaagctctgcatgaaggataa

SEQ ID NO: 24 - protein, 218 aa, Homo sapiens
  VARIANT (1)...(218): Xaa = Any Amino Acid
MAWKSSVIMQMGRFLLLVILFLPREMTSSVLTVNGKTENYILDTTPGSQASLICAVQNHTREEELLWYREEGRVDLKSXNXINSSSVCVSSISENDNGISFTCRLGRDQSVSVSVVLNVTFPPLLSGNDFQTVEEGSNVKLVCNVKANPQAQMMWYKNSSLLDLEKSRHQIQQTSESFQLSITKVEKPDNGTYSCIAKSSLKTESLDFHLIVKALHEG

SEQ ID NO: 25 - DNA, 1256 bp, Homo sapiens
caaaaccaactgcactatttttcccttcagaggaacagttggccaaggaagtcagcttctcagagctcaagagtagatctgagtttaactcattaaagatggcatggaagagcagtgtcataatgcaratgggaagatttcttctcttagtaattttatttctgccacgtgagatgacaagttctgttttaactgtgaatggtaaaactgagaactatatcctggatactacacctggctcccaagcatctctgatatgtgctgttcaaaaccacaccagagaggaagaactgctctggtaccgagaggaggggagagtggatttgaaatctgsaaacaamatcaattccagctctgtctgtgtctcttccatcagtgaaaatgacaacggaatcagctttacctgcaggctggggagggatcagtccgtgtccgtttcggtggtgctgaatgttacttttcctcctctcctaagtggaaacgacttccaaacagttgaggaaggcagtaatgtgaagttggtttgcaatgtgaaagccaacccccaggctcaaatgatgtggtacaaaaacagtagtctcctcgatttagagaaaagccgtcaccaaatccaacagacaagtgagtcttttcagctgtcaatcaccaaagtcgagaagcctgacaacggaacctacagttgtattgcaaagtcatctctgaaaacggagagcttggactttcacctgattgttaaagataaaactgtgggtgtaccaatagagcccattattgctgcatgtgttgtgatctttctgacattgtgctttggactgattgctagaagaaagaaaataatgaagctctgcatgaaggataaagaccctcacagtgaaacagctctatgagaaagctgagatgccatcgaatacagagagagttttgcatcaggacctccacaatttatgtagtcccatctgtatttattgctattattaaattcactcctgtcactcctgtttcattaatcacttaacagtagttgttaggactaatttgatacacttgtggaacatttttatggaaagagctattaagaatgaaaagtaagattttgttaagtcttctccttgaagtatatgttaattaattgagatttgttccaaataggttggtaatcatttactgtttagtgtgttttttttctaggtaggagatacttgggtctcacaaattggtgcaaagccaaaaaaaaaaaaaaaaaaaaaaaaaaaaaa

SEQ ID NO: 26 - DNA, 1272 bp, Homo sapiens
  CDS (1)...(1272)
atggccccactcggatacttcttactcctctgcagcctgaagcaggctctgggcagctacccgatctggtggtcgctggctgttgggccacagtattcctccctgggctcgcagcccatcctgtgtgccagcatcccgggcctggtccccaagcagctccgcttctgcaggaactacgtggagatcatgcccagcgtggccgagggcatcaagattggcatccaggagtgccagcaccagttccgcggccgccggtggaactgcaccaccgtccacgacagcctggccatcttcgggcccgtgctggacaaagctaccagggagtcggcctttgtccacgccattgcctcagccggtgtggcctttgcagtgacacgctcatgtgcagaaggcacggccgccatctgtggctgcagcagccgccaccagggctcaccaggcaagggctggaagtggggtggctgtagcgaggacatcgagtttggtgggatggtgtctcgggagttcgccgacgcccgggagaaccggccagatgcccgctcagccatgaaccgccacaacaacgaggctgggcgccaggccatcgccagccacatgcacctcaagtgcaagtgccacgggctgtcgggcagctgcgaggtgaagacatgctggtggtcgcaacccgacttccgcgccatcggtgacttcctcaaggacaagtacgacagcgcctcggagatggtggtggagaagcaccgggagtcccgcggctgggtggagaccctgcggccgcgctacacctacttcaaggtgcccacggagcgcgacctggtctactacgaggcctcgcccaacttctgcgagcccaaccctgagacgggctccttcggcacgcgcgaccgcacctgcaacgtcagctcgcacggcatcgacggctgcgacctgctgtgctgcggccgcggccacaacgcgcgagcggagcggcgccgggagaagtgccgctgcgtgttccactggtgctgctacgtcagctgccaggagtgcacgcgcgtctacgacgtgcacacctgcaaggatggatgcctcaggacagggcactcaggtccctgtcggagtcttgcttggatctggagccctggatcccaggggcatgacctcctggagcaacttccaaggtctgggggactaggtcagtgttcctccctgcagaactggactgctgtcagtggctgccttcgggatcatctgggagggcttccaggaggaggtgagcatggggacacttcctag

SEQ ID NO: 27 - protein, 423 aa, Homo sapiens
MAPLGYFLLLCSLKQALGSYPIWWSLAVGPQYSSLGSQPILCASIPGLVPKQLRFCRNYVEIMPSVAEGIKIGIQECQHQFRGRRWNCTTVHDSLAIFGPVLDKATRESAFVHAIASAGVAFAVTRSCAEGTAAICGCSSRHQGSPGKGWKWGGCSEDIEFGGMVSREFADARENRPDARSAMNRHNNEAGRQAIASHMHLKCKCHGLSGSCEVKTCWWSQPDFRAIGDFLKDKYDSASEMVVEKHRESRGWVETLRPRYTYFKVPTERDLVYYEASPNFCEPNPETGSFGTRDRTCNVSSHGIDGCDLLCCGRGHNARAERRREKCRCVFHWCCYVSCQECTRVYDVHTCKDGCLRTGHSGPCRSLAWIWSPGSQGHDLLEQLPRSGGLGQCSSLQNWTAVSGCLRDHLGGLPGGGEHGDTS

SEQ ID NO: 28 - DNA, 1059 bp, Homo sapiens
  CDS (1)...(1059)
atggccccactcggatacttcttactcctctgcagcctgaagcaggctctgggcagctacccgatctggtggtcgctggctgttgggccacagtattcctccctgggctcgcagcccatcctgtgtgccagcatcccgggcctggtccccaagcagctccgcttctgcaggaactacgtggagatcatgcccagcgtggccgagggcatcaagattggcatccaggagtgccagcaccagttccgcggccgccggtggaactgcaccaccgtccacgacagcctggccatcttcgggcccgtgctggacaaagctaccagggagtcggcctttgtccacgccattgcctcagccggtgtggcctttgcagtgacacgctcatgtgcagaaggcacggccgccatctgtggctgcagcagccgccaccagggctcaccaggcaagggctggaagtggggtggctgtagcgaggacatcgagtttggtgggatggtgtctcgggagttcgccgacgcccgggagaaccggccagatgcccgctcagccatgaaccgccacaacaacgaggctgggcgccaggccatcgccagccacatgcacctcaagtgcaagtgccacgggctgtcgggcagctgcgaggtgaagacatgctggtggtcgcaacccgacttccgcgccatcggtgacttcctcaaggacaagtacgacagcgcctcggagatggtggtggagaagcaccgggagtcccgcggctgggtggagaccctgcggccgcgctacacctacttcaaggtgcccacggagcgcgacctggtctactacgaggcctcgcccaacttctgcgagcccaaccctgagacgggctccttcggcacgcgcgaccgcacctgcaacgtcagctcgcacggcatcgacggctgcgacctgctgtgctgcggccgcggccacaacgcgcgagcggagcggcgccgggagaagtgccgctgcgtgttccactggtgctgctacgtcagctgccaggagtgcacgcgcgtctacgacgtgcacacctgcaagtag

SEQ ID NO: 29 - protein, 352 aa, Homo sapiens
MAPLGYFLLLCSLKQALGSYPIWWSLAVGPQYSSLGSQPILCASIPGLVPKQLRFCRNYVEIMPSVAEGIKIGIQECQHQFRGRRWNCTTVHDSLAIFGPVLDKATRESAFVHAIASAGVAFAVTRSCAEGTAAICGCSSRHQGSPGKGWKWGGCSEDIEFGGMVSREFADARENRPDARSAMNRHNNEAGRQAIASHMHLKCKCHGLSGSCEVKTCWWSQPDFRAIGDFLKDKYDSASEMVVEKHRESRGWVETLRPRYTYFKVPTERDLVYYEASPNFCEPNPETGSFGTRDRTCNVSSHGIDGCDLLCCGRGHNARAERRREKCRCVFHWCCYVSCQECTRVYDVHTCK

SEQ ID NO: 30 - DNA, 1505 bp, Homo sapiens
ccgccctcggagcccgcgcacacccgcgcacccgcggccgcaggagggcccagcgacgccgccgcgccagctcccagggcccggccccccccggcgctcacgctctcggggcggactcccggccctccgcgccctctcgcgcggcgatggccccactcggatacttcttactcctctgcagcctgaagcaggctctgggcagctacccgatctggtggtcgctggctgttgggccacagtattcctccctgggctcgcagcccatcctgtgtgccagcatcccgggcctggtccccaagcagctccgcttctgcaggaactacgtggagatcatgcccagcgtggccgagggcatcaagattggcatccaggagtgccagcaccagttccgcggccgccggtggaactgcaccaccgtccacgacagcctggccatcttcgggcccgtgctggacaaagctaccagggagtcggcctttgtccacgccattgcctcagccggtgtggcctttgcagtgacacgctcatgtgcagaaggcacggccgccatctgtggctgcagcagccgccaccagggctcaccaggcaagggctggaagtggggtggctgtagcgaggacatcgagtttggtgggatggtgtctcgggagttcgccgacgcccgggagaaccggccagatgcccgctcagccatgaaccgccacaacaacgaggctgggcgccaggccatcgccagccacatgcacctcaagtgcaagtgccacgggctgtcgggcagctgcgaggtgaagacatgctggtggtcgcaacccgacttccgcgccatcggtgacttcctcaaggacaagtacgacagcgcctcggagatggtggtggagaagcaccgggagtcccgcggctgggtggagaccctgcggccgcgctacacctacttcaaggtgcccacggagcgcgacctggtctactacgaggcctcgcccaacttctgcgagcccaaccctgagacgggctccttcggcacgcgcgaccgcacctgcaacgtcagctcgcacggcatcgacggctgcgacctgctgtgctgcggccgcggccacaacgcgcgagcggagcggcgccgggagaagtgccgctgcgtgttccactggtgctgctacgtcagctgccaggagtgcacgcgcgtctacgacgtgcacacctgcaaggatggatgcctcaggacagggcactcaggtccctgtcggagtcttgcttggatctggagccctggatcccaggggcatgacctcctggagcaacttccaaggtctgggggactaggtcagtgttcctccctgcagaactggactgctgtcagtggctgccttcgggatcatctgggagggcttccaggaggaggtgagcatggggacacttcctagggctccaacatcctcctgtaattctgagattgcatccctgcagacgccaggaaaaaagtgggttcccatggcagccggggagccctc

SEQ ID NO: 31 - DNA, 1110 bp, Homo sapiens
  CDS (1)...(1110)
atgctgtgctgcattcagtgcctctgcctggtaagtcctttcccaaccctcactccttgccaaggaggcccccattgtctcatccccattcacctctgcctcactttttctctttttggtaggtcagtgaacaatttcctgataacaggtcccaaggcctatctgacctacacgactagtgtggccttgggtgcccagagtggcatcgaggagtgcaagttccagtttgcttgggaacgctggaactgccctgaaaatgctcttcagctctccacccacaacaggctgagaagtgctaccagagagacttccttcatacatgctatcagctctgctggagtcatgtacatcatcaccaagaactgtagcatgggtgacttcgaaaactgtggctgtgatgggtcaaacaatggaaaaacaggaggccatggctggatctggggaggctgcagcgacaatgtggaatttggggaaaggatctccaaactctttgtggacagtttggagaaggggaaggatgccagagccctgatgaatcttcacaacaacagggccggcagactggcagtgagagccaccatgaaaaggacatgcaaatgtcatggcatctctgggagctgcagcatacagacatgctggctgcagctggctgaattccgggagatgggagactacctaaaggccaagtatgaccaggcgctgaaaattgaaatggataagcggcagctgagagctgggaacagcgccgagggccactgggtgcccgctgaggccttccttcctagcgcagaggcggaactgatctttttagaggaatcaccagattactgtacctgcaattccagcctgggcatctatggcacagagggtcgtgagtgcctacagaacagccacaacacatccaggtgggagcgacgtagctgtgggcgcctgtgcactgagtgtgggctgcaggtggaagagaggaaaactgaggtcataagcagctgtaactgcaaattccagtggtgctgtacggtcaagtgtgaccagtgtaggcatgtggtgagcaagtattactgcgcacgctccccaggcagtgcccagtccctgggtaagggcagtgcctga

SEQ ID NO: 32 - protein, 369 aa, Homo sapiens
MLCCIQCLCLVSPFPTLTPCQGGPHCLIPIHLCLTFSLFGRSVNNFLITGPKAYLTYTTSVALGAQSGIEECKFQFAWERWNCPENALQLSTHNRLRSATRETSFIHAISSAGVMYIITKNCSMGDFENCGCDGSNNGKTGGHGWIWGGCSDNVEFGERISKLFVDSLEKGKDARALMNLHNNRAGRLAVRATMKRTCKCHGISGSCSIQTCWLQLAEFREMGDYLKAKYDQALKIEMDKRQLRAGNSAEGHWVPAEAFLPSAEAELIFLEESPDYCTCNSSLGIYGTEGRECLQNSHNTSRWERRSCGRLCTECGLQVEERKTEVISSCNCKFQWCCTVKCDQCRHVVSKYYCARSPGSAQSLGKGSA

SEQ ID NO: 33 - DNA, 1056 bp, Homo sapiens
  CDS (1)...(1056)
atggggaacctgtttatgctctgggcagctctgggcatatgctgtgctgcattcagtgcctctgcctggtcagtgaacaatttcctgataacaggtcccaaggcctatctgacctacacgactagtgtggccttgggtgcccagagtggcatcgaggagtgcaagttccagtttgcttgggaacgctggaactgccctgaaaatgctcttcagctctccacccacaacaggctgagaagtgctaccagagagacttccttcatacatgctatcagctctgctggagtcatgtacatcatcaccaagaactgtagcatgggtgacttcgaaaactgtggctgtgatgggtcaaacaatggaaaaacaggaggccatggctggatctggggaggctgcagcgacaatgtggaatttggggaaaggatctccaaactctttgtggacagtttggagaaggggaaggatgccagagccctgatgaatcttcacaacaacagggccggcagactggcagtgagagccaccatgaaaaggacatgcaaatgtcatggcatctctgggagctgcagcatacagacatgctggctgcagctggctgaattccgggagatgggagactacctaaaggccaagtatgaccaggcgctgaaaattgaaatggataagcggcagctgagagctgggaacagcgccgagggccactgggtgcccgctgaggccttccttcctagcgcagaggcggaactgatctttttagaggaatcaccagattactgtacctgcaattccagcctgggcatctatggcacagagggtcgtgagtgcctacagaacagccacaacacatccaggtgggagcgacgtagctgtgggcgcctgtgcactgagtgtgggctgcaggtggaagagaggaaaactgaggtcataagcagctgtaactgcaaattccagtggtgctgtacggtcaagtgtgaccagtgtaggcatgtggtgagcaagtattactgcgcacgctccccaggcagtgcccagtccctgggtaagggcagtgcctga

SEQ ID NO: 34 - protein, 351 aa, Homo sapiens
MGNLFMLWAALGICCAAFSASAWSVNNFLITGPKAYLTYTTSVALGAQSGIEECKFQFAWERWNCPENALQLSTHNRLRSATRETSFIHAISSAGVMYIITKNCSMGDFENCGCDGSNNGKTGGHGWIWGGCSDNVEFGERISKLFVDSLEKGKDARALMNLHNNRAGRLAVRATMKRTCKCHGISGSCSIQTCWLQLAEFREMGDYLKAKYDQALKIEMDKRQLRAGNSAEGHWVPAEAFLPSAEAELIFLEESPDYCTCNSSLGIYGTEGRECLQNSHNTSRWERRSCGRLCTECGLQVEERKTEVISSCNCKFQWCCTVKCDQCRHVVSKYYCARSPGSAQSLGKGSA

SEQ ID NO: 35 - DNA, 768 bp, Homo sapiens
  CDS (1)...(768)
atgtacatcatcaccaagaactgtagcatgggtgacttcgaaaactgtggctgtgatgggtcaaacaatggaaaaacaggaggccatggctggatctggggaggctgcagcgacaatgtggaatttggggaaaggatctccaaactctttgtggacagtttggagaaggggaaggatgccagagccctgatgaatcttcacaacaacagggccggcagactggcagtgagagccaccatgaaaaggacatgcaaatgtcatggcatctctgggagctgcagcatacagacatgctggctgcagctggctgaattccgggagatgggagactacctaaaggccaagtatgaccaggcgctgaaaattgaaatggataagcggcagctgagagctgggaacagcgccgagggccactgggtgcccgctgaggccttccttcctagcgcagaggcggaactgatctttttagaggaatcaccagattactgtacctgcaattccagcctgggcatctatggcacagagggtcgtgagtgcctacagaacagccacaacacatccaggtgggagcgacgtagctgtgggcgcctgtgcactgagtgtgggctgcaggtggaagagaggaaaactgaggtcataagcagctgtaactgcaaattccagtggtgctgtacggtcaagtgtgaccagtgtaggcatgtggtgagcaagtattactgcgcacgctccccaggcagtgcccagtccctgggtaagggcagtgcctga

SEQ ID NO: 36 - protein, 255 aa, Homo sapiens
MYIITKNCSMGDFENCGCDGSNNGKTGGHGWIWGGCSDNVEFGERISKLFVDSLEKGKDARALMNLHNNRAGRLAVRATMKRTCKCHGISGSCSIQTCWLQLAEFREMGDYLKAKYDQALKIEMDKRQLRAGNSAEGHWVPAEAFLPSAEAELIFLEESPDYCTCNSSLGIYGTEGRECLQNSHNTSRWERRSCGRLCTECGLQVEERKTEVISSCNCKFQWCCTVKCDQCRHVVSKYYCARSPGSAQSLGKGSA

SEQ ID NO: 37 - DNA, 105 bp, Homo sapiens
  CDS (1)...(105)
atggggaacctgtttatgctctgggcagctctgggcatatgctgtgctgcattcagtgcctctgcctggtcagtgaacaatttcctgataacagggcccatctga

SEQ ID NO: 38 - protein, 34 aa, Homo sapiens
MGNLFMLWAALGICCAAFSASAWSVNNFLITGPI

SEQ ID NO: 39 - DNA, 72 bp, Homo sapiens
  CDS (1)...(72)
atggggaacctgtttatgctctgggcagctctgggcatatgctgtgctgcattcagtgcctctgcctggtaa

SEQ ID NO: 40 - protein, 23 aa, Homo sapiens
MGNLFMLWAALGICCAAFSASAW

SEQ ID NO: 41 - DNA, 111 bp, Homo sapiens
  CDS (1)...(111)
atggggaacctgtttatgctctgggcagctctgggcatatgctgtgctgcattcagtgcctctgcctggtcagtgaacaatttcctgataacaggtcccaaggtaggatga

SEQ ID NO: 42 - protein, 36 aa, Homo sapiens
MGNLFMLWAALGICCAAFSASAWSVNNFLITGPKVG

SEQ ID NO: 43 - DNA, 1056 bp, Homo sapiens
  CDS (1)...(1056)
atgggtcacctggttttgcatggtcaccctggcacattacaggtggaaggggtctttgggagtaccaggtcagtgaacaatttcctgataacaggtcccaaggcctatctgacctacacgactagtgtggccttgggtgcccagagtggcatcgaggagtgcaagttccagtttgcttgggaacgctggaactgccctgaaaatgctcttcagctctccacccacaacaggctgagaagtgctaccagagagacttccttcatacatgctatcagctctgctggagtcatgtacatcatcaccaagaactgtagcatgggtgacttcgaaaactgtggctgtgatgggtcaaacaatggaaaaacaggaggccatggctggatctggggaggctgcagcgacaatgtggaatttggggaaaggatctccaaactctttgtggacagtttggagaaggggaaggatgccagagccctgatgaatcttcacaacaacagggccggcagactggcagtgagagccaccatgaaaaggacatgcaaatgtcatggcatctctgggagctgcagcatacagacatgctggctgcagctggctgaattccgggagatgggagactacctaaaggccaagtatgaccaggcgctgaaaattgaaatggataagcggcagctgagagctgggaacagcgccgagggccactgggtgcccgctgaggccttccttcctagcgcagaggcggaactgatctttttagaggaatcaccagattactgtacctgcaattccagcctgggcatctatggcacagagggtcgtgagtgcctacagaacagccacaacacatccaggtgggagcgacgtagctgtgggcgcctgtgcactgagtgtgggctgcaggtggaagagaggaaaactgaggtcataagcagctgtaactgcaaattccagtggtgctgtacggtcaagtgtgaccagtgtaggcatgtggtgagcaagtattactgcgcacgctccccaggcagtgcccagtccctgggtaagggcagtgcctga

SEQ ID NO: 44 - protein, 351 aa, Homo sapiens
MGHLVLHGHPGTLQVEGVFGSTRSVNNFLITGPKAYLTYTTSVALGAQSGIEECKFQFAWERWNCPENALQLSTHNRLRSATRETSFIHAISSAGVMYIITKNCSMGDFENCGCDGSNNGKTGGHGWIWGGCSDNVEFGERISKLFVDSLEKGKDARALMNLHNNRAGRLAVRATMKRTCKCHGISGSCSIQTCWLQLAEFREMGDYLKAKYDQALKIEMDKRQLRAGNSAEGHWVPAEAFLPSAEAELIFLEESPDYCTCNSSLGIYGTEGRECLQNSHNTSRWERRSCGRLCTECGLQVEERKTEVISSCNCKFQWCCTVKCDQCRHVVSKYYCARSPGSAQSLGKGSA

SEQ ID NO: 45 - DNA, 105 bp, Homo sapiens
  CDS (1)...(105)
atgggtcacctggttttgcatggtcaccctggcacattacaggtggaaggggtctttgggagtaccaggtcagtgaacaatttcctgataacagggcccatctga

SEQ ID NO: 46 - protein, 34 aa, Homo sapiens
MGHLVLHGHPGTLQVEGVFGSTRSVNNFLITGPI

SEQ ID NO: 47 - DNA, 111 bp, Homo sapiens
  CDS (1)...(111)
atgggtcacctggttttgcatggtcaccctggcacattacaggtggaaggggtctttgggagtaccaggtcagtgaacaatttcctgataacaggtcccaaggtaggatga

SEQ ID NO: 48 - protein, 36 aa, Homo sapiens
MGHLVLHGHPGTLQVEGVFGSTRSVNNFLITGPKVG

SEQ ID NO: 49 - DNA, 2257 bp, Homo sapiens
tatggggaacctgtttatgctctgggcagctctgggcatatgctgtgctgcattcagtgcctctgcctggtaagtcctttcccaaccctcactccttgccaaggaggcccccattgtctcatccccattcacctctgcctcactttttctctttttggtagagcggttccagcaccgggttcggaggtaggccagccccaccagaatgagagcttggccaggatgaaaatatctgctaattcatcttgggctcataagtactgagtattggcgtttcccgaatgggtcacctggttttgcatggtcaccctggcacattacaggtggaaggggtctttgggagtaccaggtcagtgaacaatttcctgataacaggtcccaaggtaggatgatctccagcttctgtttttacccactgagggccctaaggggactcttctggagaaaagaggggcggggacagtgccagagcccctcacccagaggaacccatggttgattcttaatggagagctggcccatctgagtcctgcctgctcccccaaccacagatgacccataccgggcagaagctcacagcccttttccctttgccaggcctatctgacctacacgactagtgtggccttgggtgcccagagtggcatcgaggagtgcaagttccagtttgcttgggaacgctggaactgccctgaaaatgctcttcagctctccacccacaacaggctgagaagtgctaccagagagacttccttcatacatgctatcagctctgctggagtcatgtacatcatcaccaagaactgtagcatgggtgacttcgaaaactgtggctgtgatgggtcaaacaatggaaaaacaggaggccatggctggatctggggaggctgcagcgacaatgtggaatttggggaaaggatctccaaactctttgtggacagtttggagaaggggaaggatgccagagccctgatgaatcttcacaacaacagggccggcagactggcagtgagagccaccatgaaaaggacatgcaaatgtcatggcatctctgggagctgcagcatacagacatgctggctgcagctggctgaattccgggagatgggagactacctaaaggccaagtatgaccaggcgctgaaaattgaaatggataagcggcagctgagagctgggaacagcgccgagggccactgggtgcccgctgaggccttccttcctagcgcagaggcggaactgatctttttagaggaatcaccagattactgtacctgcaattccagcctgggcatctatggcacagagggtcgtgagtgcctacagaacagccacaacacatccaggtgggagcgacgtagctgtgggcgcctgtgcactgagtgtgggctgcaggtggaagagaggaaaactgaggtcataagcagctgtaactgcaaattccagtggtgctgtacggtcaagtgtgaccagtgtaggcatgtggtgagcaagtattactgcgcacgctccccaggcagtgcccagtccctgggtaagggcagtgcctgataataycccacacaagttcacttgattaattgcatcagtggaaggggacatagcttctctcttagagagaacagattggaaagcaatcggaaaattgcagttttggtctgtagtcctcatgatatctgctatcagtggggaaaatggaggcccaagattctacagcatattcctggcggggctgaaattggaacctgggcctcctgactttggcagacccccatttcatctttcctgcaaactactttcccatctttgtgcctgtacttatgcagctttctacagggagagtttggtttggggtctatatctagagggaccttcaaagtatttgttcctttaaatttcagaccatgtccaacccagctgtgctgctgggaatcaggagaatagaagcaaaaaacgaaagagttctgttcagacttctgaagagcagcctgtggctacaaatctatgctgataaatgagaattaggagctcctaagaaaaccctgagtcctgttccccgggtctcctttggttcactgccaatctactcaggcttgctggcaggtgagtaagtggttagggaaactagagtggaaaggaagtaattgatcacctactaaatgtcaggtgcttaacagatatcggctccttcaatcctcaggccaatccaattaaagaggtacaattattccttttcaactactgaggaaactggctc

SEQ ID NO: 50 - DNA, 1350 bp, Homo sapiens
  CDS (1)...(1350)
atgttcggcatctcgggtgggacagctcgcatgccgcatgaccatggcttgacagtgggtgttgctgtgatccccgcagccctgaagctgagcctggaatgcagggtcgacctcctcttcctgctggacagctctgcgggcaccactctggacggcttcctgcgggccaaagtcttcgtgaagcggtttgtgcgggccgtgctgagcgaggactctcgggcccgagtgggtgtggccacatacagcagggagctgctggtggcggtgcctgtgggggagtaccaggatgtgcctgacctggtctggagcctcgatggcattcccttccgtggtggccccaccctgacgggcagtgccttgcggcaggcggcagagcgtggcttcgggagcgccaccaggacaggccaggaccggccacgtagagtggtggttttgctcactgagtcacactccgaggatgaggttgcgggcccagcgcgtcacgcaagggcgcgagagctgctcctgctgggtgtaggcagtgaggccgtgcgggcagagctggaggagatcacaggcagcccaaagcatgtgatggtctactcggatcctcaggatctgttcaaccaaatccctgagctgcaggggaagctgtgcagccggcagcggccagggtgccggacacaagccctggacctcgtcttcatgttggacacctctgcctcagtagggcccgagaattttgctcagatgcagagctttgtgagaagctgtgccctccagtttgaggtgaaccctgacgtgacacaggtcggcctggtggtgtatggcagccaggtgcagactgccttcgggctggacaccaaacccacccgggctgcgatgctgcgggccattagccaggccccctacctaggtggggtgggctcagccggcaccgccctgctgcacatctatgacaaagtgatgaccgtccagaggggtgcccggcctggtgtccccaaagctgtggtggtgctcacaggcgggagaggcgcagaggatgcagccgttcctgcccagaagctgaggaacaatggcatctctgtcttggtcgtgggcgtggggcctgtcctaagtgagggtctgcggaggcttgcaggtccccgggattccctgatccacgtggcagcttacgccgacctgcggtaccaccaggacgtgctcattgagtggctgtgtggagaagccaagcagccagtcaacctctgcaaacccagcccgtgcatgaatgagggcagctgcgtcctgcagaatgggagctaccgctgcaagtgtcgggatggctgggagggcccccactgcgagaaccgattcttgagacgcccctga

SEQ ID NO: 51 - protein, 449 aa, Homo sapiens
MFGISGGTARMPHDHGLTVGVAVIPAALKLSLECRVDLLFLLDSSAGTTLDGFLRAKVFVKRFVRAVLSEDSRARVGVATYSRELLVAVPVGEYQDVPDLVWSLDGIPFRGGPTLTGSALRQAAERGFGSATRTGQDRPRRVVVLLTESHSEDEVAGPARHARARELLLLGVGSEAVRAELEEITGSPKHVMVYSDPQDLFNQIPELQGKLCSRQRPGCRTQALDLVFMLDTSASVGPENFAQMQSFVRSCALQFEVNPDVTQVGLVVYGSQVQTAFGLDTKPTRAAMLRAISQAPYLGGVGSAGTALLHIYDKVMTVQRGARPGVPKAVVVLTGGRGAEDAAVPAQKLRNNGISVLVVGVGPVLSEGLRRLAGPRDSLIHVAAYADLRYHQDVLIEWLCGEAKQPVNLCKPSPCMNEGSCVLQNGSYRCKCRDGWEGPHCENRFLRRP

SEQ ID NO: 52 - DNA, 1786 bp, Homo sapiens
tttttctttaaaaagtggctagatggagacccttagcgagtgccaggagtgccatgtctggccttgtctctaactctgtgacgagcacgggtcacttaagctcggggggcccacagtttctctgcaccatctccctcctgggagatgttcggcatctcgggtgggacagctcgcatgccgcatgaccatggcttgacagtgggtgttgctgtgatccccgcagccctgaagctgagcctggaatgcagggtcgacctcctcttcctgctggacagctctgcgggcaccactctggacggcttcctgcgggccaaagtcttcgtgaagcggtttgtgcgggccgtgctgagcgaggactctcgggcccgagtgggtgtggccacatacagcagggagctgctggtggcggtgcctgtgggggagtaccaggatgtgcctgacctggtctggagcctcgatggcattcccttccgtggtggccccaccctgacgggcagtgccttgcggcaggcggcagagcgtggcttcgggagcgccaccaggacaggccaggaccggccacgtagagtggtggttttgctcactgagtcacactccgaggatgaggttgcgggcccagcgcgtcacgcaagggcgcgagagctgctcctgctgggtgtaggcagtgaggccgtgcgggcagagctggaggagatcacaggcagcccaaagcatgtgatggtctactcggatcctcaggatctgttcaaccaaatccctgagctgcaggggaagctgtgcagccggcagcggccagggtgccggacacaagccctggacctcgtcttcatgttggacacctctgcctcagtagggcccgagaattttgctcagatgcagagctttgtgagaagctgtgccctccagtttgaggtgaaccctgacgtgacacaggtcggcctggtggtgtatggcagccaggtgcagactgccttcgggctggacaccaaacccacccgggctgcgatgctgcgggccattagccaggccccctacctaggtggggtgggctcagccggcaccgccctgctgcacatctatgacaaagtgatgaccgtccagaggggtgcccggcctggtgtccccaaagctgtggtggtgctcacaggcgggagaggcgcagaggatgcagccgttcctgcccagaagctgaggaacaatggcatctctgtcttggtcgtgggcgtggggcctgtcctaagtgagggtctgcggaggcttgcaggtccccgggattccctgatccacgtggcagcttacgccgacctgcggtaccaccaggacgtgctcattgagtggctgtgtggagaagccaagcagccagtcaacctctgcaaacccagcccgtgcatgaatgagggcagctgcgtcctgcagaatgggagctaccgctgcaagtgtcgggatggctgggagggcccccactgcgagaaccgattcttgagacgcccctgaggcacatggctcccgtgcaggagggcagcagccgtacccctcccagcaactacagagaaggcctgggcactgaaatggtgcctaccttctggaatgtctgtgccccaggtccttagaatgtctgcttcccgccgtggccaggaccactattctcactgagggaggaggatgtcccaactgcagccatgctgcttagagacaagaaagcagctgatgtcacccacaaacgatgttgttgaaaagttttgatgtgtaagtaaatacccactttctgtaaaaaaaaaaaaaaaaa

SEQ ID NO: 53 - DNA, 867 bp, Homo sapiens
  CDS (1)...(867)
atgcgcccccaccccattttgctcctagcctgctcctgcaaccagcacgcccgacgctgccggttcaactctgagctgttcagactgtcgggcggccggagtgggggtgtttgtgagcggtgccgccaccacacagctgggcggcactgccactactgccaacctgggttctggagggaccctagccagcctatcttcagccgcagggcctgcagagcctgccagtgccaccctattggggcaacaggaggaacctgcaaccagaccagtgggcagtgcacctgcaagttaggggtcacaggcctgacctgcaaccgctgtggccctggctaccagcagagccgctcccccaggatgccctgccagcgaattccagaggcaacaaccacccttgccactactcctggtgcttatagctctgaccctcagtgtcaaaactactgcaatatgtcggacaccagggtacacatgagccttcggaggtactgccagcaggaccatgttctccgcgcgcaggtgctagcgtccgaggcggcgggcccggcatggcagcggctggccgtgcgcgtgctggccgtttacaagcagcgggcgcagcccgtgcgacgcggcgaccaggacgcctgggtgccccgcgccgacctgacctgcggctgcctgcgcctgcagccaggcaccgactacctgctgctgggcagcgccgtgggcgaccccgaccccacgcgcctcatcctcgaccgccacggcctcgcgctgccatggaggccgcgctgggcccggcccctgaagcggctgcagcaggaggagcgcgccggaggctgccgcggcgtgcgggcacccacacccagccccaggccggagcactag

SEQ ID NO: 54 - protein, 288 aa, Homo sapiens
MRPHPILLLACSCNQHARRCRFNSELFRLSGGRSGGVCERCRHHTAGRHCHYCQPGFWRDPSQPIFSRRACRACQCHPIGATGGTCNQTSGQCTCKLGVTGLTCNRCGPGYQQSRSPRMPCQRIPEATTTLATTPGAYSSDPQCQNYCNMSDTRVHMSLRRYCQQDHVLRAQVLASEAAGPAWQRLAVRVLAVYKQRAQPVRRGDQDAWVPRADLTCGCLRLQPGTDYLLLGSAVGDPDPTRLILDRHGLALPWRPRWARPLKRLQQEERAGGCRGVRAPTPSPRPEH

SEQ ID NO: 55 - DNA, 786 bp, Homo sapiens
  CDS (1)...(786)
atgcgcccccaccccattttgctcctagcctgctcctgcaaccagcacgcccgacgctgccggttcaactctgagctgttcagactgtcgggcggccggagtgggggtgtttgtgagcggtgccgccaccacacagctgggcggcactgccactactgccaacctgggttctggagggaccctagccagcctatcttcagccgcagggcctgcagagcctgccagtgccaccctattggggcaacaggaggaacctgcaaccagaccagtgggcagtgcacctgcaagttaggggtcacaggcctgacctgcaaccgctgtggccctggctaccagcagagccgctcccccaggatgccctgccagcgaattccagaggcaacaaccacccttgccactactcctggtgcttatagctctgttctccgcgcgcaggtgctagcgtccgaggcggcgggcccggcatggcagcggctggccgtgcgcgtgctggccgtttacaagcagcgggcgcagcccgtgcgacgcggcgaccaggacgcctgggtgccccgcgccgacctgacctgcggctgcctgcgcctgcagccaggcaccgactacctgctgctgggcagcgccgtgggcgaccccgaccccacgcgcctcatcctcgaccgccacggcctcgcgctgccatggaggccgcgctgggcccggcccctgaagcggctgcagcaggaggagcgcgccggaggctgccgcggcgtgcgggcacccacacccagccccaggccggagcactag

SEQ ID NO: 56 - protein, 261 aa, Homo sapiens
MRPHPILLLACSCNQHARRCRFNSELFRLSGGRSGGVCERCRHHTAGRHCHYCQPGFWRDPSQPIFSRRACRACQCHPIGATGGTCNQTSGQCTCKLGVTGLTCNRCGPGYQQSRSPRMPCQRIPEATTTLATTPGAYSSVLRAQVLASEAAGPAWQRLAVRVLAVYKQRAQPVRRGDQDAWVPRADLTCGCLRLQPGTDYLLLGSAVGDPDPTRLILDRHGLALPWRPRWARPLKRLQQEERAGGCRGVRAPTPSPRPEH

SEQ ID NO: 57 - DNA, 1378 bp, Homo sapiens
tttatctcatttaagcctcaagtaaacattataaatgccactgcactccagcctgggtgacggagtgagtctccgtctcaaaaaraaaagataataatagagatgtcctgggacccaggcattctcttctaccttggacactcacggcttcctttcatgagggcagggccatgggaagaaagctgaggactggggagcagcacactcggccctgatgcgcccccaccccattttgctcctagcctgctcctgcaaccagcacgcccgacgctgccggttcaactctgagctgttcagactgtcgggcggccggagtgggggtgtttgtgagcggtgccgccaccacacagctgggcggcactgccactactgccaacctgggttctggagggaccctagccagcctatcttcagccgcagggcctgcagagcctgccagtgccaccctattggggcaacaggaggaacctgcaaccagaccagtgggcagtgcacctgcaagttaggggtcacaggcctgacctgcaaccgctgtggccctggctaccagcagagccgctcccccaggatgccctgccagcgaattccagaggcaacaaccacccttgccactactcctggtgcttatagctctgaccctcagtgtcaaaactactgcaatatgtcggacaccagggtacacatgagccttcggaggtactgccagcaggaccatgttctccgcgcgcaggtgctagcgtccgaggcggcgggcccggcatggcagcggctggccgtgcgcgtgctggccgtttacaagcagcgggcgcagcccgtgcgacgcggcgaccaggacgcctgggtgccccgcgccgacctgacctgcggctgcctgcgcctgcagccaggcaccgactacctgctgctgggcagcgccgtgggcgaccccgaccccacgcgcctcatcctcgaccgccacggcctcgcgctgccatggaggccgcgctgggcccggcccctgaagcggctgcagcaggaggagcgcgccggaggctgccgcggcgtgcgggcacccacacccagccccaggccggagcactagacgtgagatggggctgcctcgagcaccaacaaagtaatttgggagcgactaggagctgagccttctacctcgacggtgcactgcagagagccaatcagacgtcgcagagccccgacgacactatgcttgcgcccacgccgagcaggcgtgcggaacttttagcaaaaggcggcaagcgggacttctggtcccagcatttcctcctttggcctgtggcttattccccgccagtgatctgtttcccccaataaagtctcaaatctttgggaaaaaaaaaaaaaaaaaaaaaaaaaaaaa

SEQ ID NO: 58 - DNA, 16557 bp, Homo sapiens
  CDS (1)...(16557)
atgatttcctgggaagttgtccatacagtattcctgtttgctcttctttattcttccctagctcaagatgcgagcccccagtcagagatcagagctgaggaaattcccgagggggcctccacgttggcttttgtgtttgatgtgactggttctatgtatgatgatttagttcaggtgattgaaggggcttccaaaattttggagacgtctttgaaaagacctaaaagacctcttttcaactttgcgttggtgcctttccatgatccagaaattggcccagtgacaattaccacagatcccaagaaatttcaatatgaactcagagaactgtatgttcagggtggtggtgattgcccagaaatgagtattggagctataaaaattgccttggaaattyctcttcctggttctttcatctatgttttcactgatgctcggtccaaagattaccggctcacccatgaggtgctgcaacttatccaacagaaacagtcacaagtcgtatttgttctgactggagattgtgatgacaggacccatattggatataaagtctatgaagaaattgcctctacaagttctggtcaagtgttccatctggacaaaaaacaagttaatgaggtattaaaatgggtagaagaagcagtacaggcctccaaagttcaccttttatccacagatcatttggaacaggctgtaaatacttggagaattccttttgatcccagcctgaaagaggtcactgtgtctttgagtgggccttctccaatgattgaaattcgcaatcctttagggaagctgataaaaaagggatttggcctgcatgagctattaaatatccataactctgccaaagtagtgaatgtgaaagagccagaggctggaatgtggacagtgaagacctcaagcagtggaaggcactctgttcgcattactggcctcagtactattgatttccgagctggcttttctcgaaagcccaccctggacttcaaaaaaacagtcagcagaccagtgcaaggaatacctacctatgtactgctcaatacttctggaatttccactccagctagaatagatcttcttgaacttttgagtatctcaggaagttctcttaagactawtcctgttaaatattacccacatcgaaaaccttatggcatatggaatatttctgactttgtaccaccaaatgaagctttctttctcaaagtaacaggctatgataaagatgattacctcttccagagagtatcaagtgtttccttttctagtattgtcccagatgctcccaaagttacgatgcctgagaaaaccccaggatactatctgcagccgggccaaattccctgctctgttgacagtcttttgccctttaccttgagctttgtcagaaatggagttacacttggagtagaccagtatttgaaagaatctgccagtgtgaacttagatattgcaaaggtcactttgtctgacgaaggtttctatgaatgcattgctgtcagcagtgcaggtactggacgggcacagacattttttgacgtatcagagccccctccggtcatccaagtgcctaacaatgttacagtcactcctggagagagagcagttttaacatgtctcatcatcagtgcggtggattacaatctaacctggcagaggaatgacagagatgtcagactggcagagccagcgagaattaggaccttggctaatctgtcattggagctaaagagtgtgaaattcaacgatgctggagagtatcattgtatggtttctagtgaaggtggatcatcagccgcttcagttttcctcacagtgcaagaaccacccaaagtcactgtgatgcccaagaatcagtctttcacaggagggtctgaggtctccatcatgtgttctgcaacaggttatcccaaaccaaagattgcctggaccgttaacgatatgtttatcgtgggttcacacaggtataggatgacctcagatggtaccttatttatcaaaaatgcagctcccaaagatgcagggatctatggttgcctagcaagtaattcagctggaacagataracagaattctactctcagatacattgaagcccctaagttgatggtagttcagagtgagctcttggttgcccttggggatataaccgttatggaatgcaaaacctctggtattcctccacctcaagttaaatggttcaaaggagatcttgagttgaggccctcaacattcctcattattgaccctctcttgggacttttgaagattcaagaaacacaagatctggatgctggcgattatacctgtgtagccatcaatgaggctggaagagcaactggcaagataactctggatgttggctcacctccagttttcatacaagaacctgctgatgtgtctatggaaattggctcaaatgtgacattaccttgttatgttcagggttatccagaaccaacaatcaaatggcgaagattagacaacatgccaattttctcaagacytttttcagttagttccatcagccaactaagaacaggagctctctttattttaaacttatgggcaagtgataaaggaacctatatttgtgaagctgaaaaccagtttggaaagatccagtcagagacaacagtaacagtgaccggacttgttgctccacttattggaatcagcccttcagtggccaatgttattgaaggacagcagcttactttgccctgtactctgttagctggaaatcccattccagaacgtcggtggattaagaattcagctatgttgctccaaaatccttacatcactgtgcgcagtgatgggagcctccatattgaaagagttcagcttcaggatggtggtgaatatacttgtgtggccagtaacgttgctgggaccaataacaaaactacctctgtggttgtgcatgttctgccaaccattcagcatgggcagcagatactcagtacaattgaaggcattccagtaactttaccatgcaaagcaagtggaaatcccaaaccgtctgtcatctggtccaagaaaggagagctgatttcaaccagcagtgctaagttttcagcaggagctgatggtagtctgtatgtggtatcacctggaggagaggagagtggggagtatgtctgcactgccaccaatacagccggctacgccaaaaggaaagtgcagctaacagtctatgtaaggcccagagtgtttggagatcaacgaggactgycccaggataagcctgttgagatctccgtccttgcaggggaagaggtaacacttccatgtgaagtgaagagcttacctccacccataattacttgggccaaagaaacccagctcatctcaccgttctctccaagacacacattcctcccttctggttcaatgaagatcactgaaacccgcacttcagatagtgggatgtatctttgtgttgccacaaatattgctgggaatgtgactcaggctgtcaaattaaatgtccatgttcctccaaagatacagcgtggacctaaacatctcaaagtccaagttggtcaaagagtggatattccatgtaatgctcaagggactcctcttcctgtaatcacctggtccaaaggtggaagcactatgctggttgatggagagcaccatgttagcaatccagacggaactttaagcatcgaccaagccacgccctcagatgctggcatatatacatgtgttgctactaacatagcaggcactgatgaaacagagataacgctacatgtccaagaaccacccrcagtggaagatctagaacctccatataacactactttccaagaaagagtggccaatcaacgcattgaatttccatgtcctgcaaaaggtacccctaaaccaaccatcaaatggttacacaatggtagagagttgacaggcagagagcctggcatttctatcttggaagatggcacattgctggttattgcttctgttacaccctatgacaatggggagtacatctgtgtggcagtcaatgaagctggaaccacagaaagaaaatataacctcaaagtccatgttcctccagtaattaaagataaagaacaagttacaaatgtgtcggtgttgttaaatcagctgaccaatctcttctgtgaagtggaaggcactccatctcccatcattatgtggtataaagataatgtccaggtgactgaaagcagcactattcagactgtgaacaatgggaagatactgaagctcttcagagccactccagaggatgcaggaagatattcctgcaaagcaattaatattgcaggcacttctcagaagtactttaacattgatgtgctagttccacccaccataataggtaccaacttcccaaatgaagtctcagttgtcctcaaccgtgacgtcgcccttgaatgccaggtcaaaggcactccctttcctgatattcattggttcaaagatggcaagcctttatttttgggcgatcctaatgttgaacttctagacagaggacaagtcttacatttaaagaatgcacggagaaatgacaaggggcgctaccaatgtactgtgtctaatgcagctggcaaacaagccaaggatataaaactgactatctatattccacctagtattaaaggaggaaatgtcaccacrgmcatatcagtattgatcaacagccttattaaactggaatgtgaaacacggggacttccaatgcctgccattacttggtataaggacgggcagccaatcatgtccagctcacaagcactttatattgataaaggacaatatcttcatattcctcgagcacaggtctctgattcagcaacatatacgtgtcaygtagccaatgttgctggaactgctgaaaaatcattccatgtggatgtctatgttcctccaatgattgaaggcaacttggccacgcctttgaataagcaagtagttattgctcattctctgacactggagtgcaaagctgctggaaacccttctcccattctcacctggttgaaagatggtgtacctgtgaaagctaatgacaatatccgcatagaagctggtgggaagaaactcgaaatcatgagtgcccaagaaattgatcgaggacagtacatatgcgtggctaccagtgtggcaggagaaaaggaaatcaaatatgaagttgatgtcttggtgccaccagctatagaaggaggagatgaaacatcttacttcattgtgatggttaataacttactggagctagattgtcatgtgacaggctctcccccaccaactatcatgtggctgaaggatggccagttaattgatgaaagggatggattcaagattttattaaatggacgcaaactggttattgctcaggctcaagtgtcaaacacaggcctttatcggtgcatggcagcaaatactgctggagaccacaagaaggaatttgaagtgactgttcatgttcctccaacaatcaagtcctcaggcctttctgagagagttgtggtaaaatacaagcctgtcgccttgcagtgcatagccaatgggattccaaatccttccattacatggttaaaagatgaccagcctgtgaacactgcccaaggaaaccttaaaatacagtcttctggtcgagttctacaaattgccaaaaccctgttggaagatgctggcagatacacatgtgtggctaccaacgcagctggagaaacacaacagcacattcaactgcatgttcatgaaccacctagtctggaagatgctggaaaaatgctgaatgagactgtgttggtgagcaaccctgtacagctggagtgtaaggcagctggaaatcctgtgcctgttattacatggtacaaagataatcgtctactctcaggttccaccagcatgactttcttgaacagaggacagatcattgatattgaaagtgcccagatctcagatgctggcatatataaatgcgtggccatcaactcagctggagctacagagttattttacagtctgcaagttcatgtggccccatcaatttctggcagcaataacatggtggcagtggtggttaataacccggtgaggttagaatgtgaagccagaggtattcctgccccaagtctgacctggttgaaagatgggagtcctgtttctagtttttctaatggattacaggttctctctggtggtcgaatcctagcattgaccagtgcacaaatcagcgacacaggaaggtacacctgcgtggcagtgaatgctgctggagaaaagcaaagggacattgacctccgagtatatgttccgccaaatattatgggagaagaacagaatgtctctgtcctcattagccaagctgtggaattactatgtcaaagtgatgctattcccccacctactcttacttggttaaaagacggccaccccttgctgaagaaaccaggcctcagtatatctgaaaatagaagtgtgttaaagattgaagatgctcaggttcaagacactggtcgttacacttgtgaagcaacaaatgttgctggaaaaactgaaaaaaactacaatgtcaacatttgggtccccccaaatattggtggttctgatgaacttactcaacttacagtcattgaagggaatctcattagtctgttgtgtgaatcaagtggtattccacccccaaatctcatctggaagaagaaaggctctccagtgctgactgattccatggggcgagytagaattttatctgggggcaggcaattacaaatttcaattgctgaaaagtctgatgcagcactctattcatgtgtggcgtcgaatgttgctgggactgcaaagaaagaatacaatctgcaagtttacattagaccaaccataaccaacagtggcagccaccctactgaaattattgtgacccgagggaagagtatctccttggagtgtgaggtgcagggtattccaccaccaacagtgacctggatgaaagatggccaccccttgatcaaggcaaagggagtagaaatactggatgaaggtcacatccttcagctgaagaacattcatgtatctgacacaggccgttatgtgtgtgttgctgtgaatgtagcaggaatgactgacaaaaaatatgacttaagtgtccatgctcctccaagcatcataggaaaccacaggtcacctgaaaatattagtgtggtagaaaagaactcagtatctttgacttgtgaagcttctggaattcccctgccttccayaacctggttcaaagatgggtggcctgtcagccttagcaattctgtgaggattctttcaggaggcaggatgctacggctgatgcagaccacaatggaagatgctggccaatatacttgcgttgtaaggaatgcagctggtgaagaaagaaaaatctttgggctttcagtattagtaccacctcatattgtgggtgaaaatacattggaagatgtgaaggtaaaagagaaacagagtgttacgctgacttgtgaagtgacagggaatccagtgccagaaattacatggcacaaagatgggcagcccctccaagaagatgaagcccatcacattatatctggtggccgttttcttcaaattaccaatgtccaggtgccacacactggaagatatacatgtttggcttccagtccagctggccacaagagcaggagcttcagtcttaatgtatttgtatctcctacaattgctggtgtaggtagtgatggcaaccctgaagatgtcactgtcatccttaacagccctacatctttggtctgtgaagcttattcatatcctccagctaccatcacctggtttaaggatggcactcctttagaatctaaccgaaatattcgtattcttccaggaggcagaactctgcagatcctcaatgcacaggaggacaatgctggaagatactcttgtgtagccacgaatgaggctggagaaatgataaagcactatgaagtgaaggtgtacattccacccataatcaataaaggggacctttgggggccaggtctttcccctaaagaagtgaagatcaaagtaaacaacactctgaccttggaatgtgaagcgtatgcaattccttctgcctccctcagctggtacaaggatggacagccccttaaatccgatgatcatgttaatattgctgcgaatggacacacacttcaaataaaggaggctcaaatatcagacaccggacgatatacttgtgtagcatctaacattgcaggtgaagatgagttggattttgatgtgaatattcaagttcctccaagttttcagaaactctgggaaataggaaacatgctagatactggcaggaatggtgaagccaaagatgtgatcatcaacaatcccatttctctttactgtgagacaaatgctgctccccctcctacactgacatggtacaaagatggccaccctctgacctcaagtgataaagtattgattttgccaggagggcgagtgttgcagattcctcgggctaaagtagaagatgctgggagatacacatgtgtggctgtgaatgaggctggagaagattcccttcaatatgatgtccgtgtactcgtgccgccaattatcaagggagcaaatagtgatctccctgaagaggtcaccgtgctggtgaacaagagtgcactgatagagtgtttatccagtggcagcccagcaccaaggaattcctggcagaaagatggacagcccttgctagaagatgaccatcataaatttctatctaatggacgaattctgcagattctgaatactcaaataacagatatcggcaggtatgtgtgtgttgctgagaacacagctgggagtgccaaaaaatattttaacctcaatgttcatgttcctccaagtgtcattggtcctaaatctgaaaatcttaccgtcgtggtgaacaatttcatctctttgacctgtgaggtctctggttttccacctcctgacctcagctggctcaagaatgaacagcccatcaaactgaacacaaatactctcattgtgcctggtggtcgaactctacagattattcgggccaaggtatcagatggtggtgaatacacttgtatagctatcaatcaagctggcgaaagcaagaaaaagttttccctgactgtttatgtgcccccaagcattaaagaccatgacagtgaatctctttctgtagttaatgtaagagagggaacttctgtgtctttggagtgtgagtcgaacgctgtgccacctccagtcatcacttggtataagaatgggcggatgataacagagtctactcatgtggagattttagctgatggacaaatgctacacattaagaaagctgaggtatctgacacaggccagtatgtatgtagagctataaatgtagcaggacgggatgataaaaatttccacctcaatgtatatgtgccacccagtattgaaggacctgaaagagaagtgattgtggagacgatcagcaatcctgtgacattaacatgtgatgccactgggatcccacctcccacgatagcatggttaaagaaccacaagcgcatagaaaattctgactcactggaagttcgtattttgtctggaggtagcaaactccagattgcccggtctcagcattcagatagtggaaactatacatgtattgcttcaaatatggagggaaaagcccagaaatattactttctttcaattcaagttcctccaagtgttgctggtgctgaaattccaagtgatgtcagtgtccttctaggagaaaatgttgagctggtctgcaatgcaaatggcattcctactccacttattcaatggcttaaagatggaaagcccatagctagtggtgaaacagaaagaatccgagtgagtgcaaatggcagcacattaaacatttatggagctcttacatctgacacggggaaatacacatgtgttgctactaatcccgctggagaagaagaccgaatttttaacttgaatgtctatgttacacctacaattaggggtaataaagatgaagcagagaaactaatgactttagtggatacttcaataaatattgaatgcagagccacagggacgcctccaccacagataaactggctgaagaatggacttcctctgcctctctcctcccatatccggttactggcagcaggacaagttatcaggattgtgagagctcaggtgtctgatgtcgctgtgtatacttgtgtggcctccaacagagctggggtggataataagcattacaatcttcaagtgtttgcaccaccaaatatggacaattcaatggggacagaggaaatcacagttctcaaaggtagttccacctctatggcatgcattactgatggaaccccagctcccagtatggcctggcttagagatggccagcctctggggcttgatgcccatctgacagtcagcacccatggaatggtcctgcagctcctcaaagcagagactgaagattcgggaaagtacacctgcattgcctcaaatgaagctggagaagtcagcaagcactttatcctcaaggtcctagaaccacctcacattaatggatctgaagaacatgaagagatatcagtaattgttaataacccacttgaacttacctgcattgcttctggaatcccagcccctaaaatgacctggatgaaagatggccggccccttccacagacggatcaagtgcaaactctaggaggaggagaggttcttcgaatttctactgctcaggtggaggatacaggaagatatacatgtctggcatccagtcctgcaggagatgatgataaggaatatctagtgagagtgcatgtacctcctaatattgctggaactgatgagccccgggatatcactgtgttacggaacagacaagtgacattggaatgcaagtcagatgcagtgcccccacctgtaattacttggctcagaaatggagaacggttacaggcaacacctcgagtgcgaatcctatctggagggagatacttgcaaatcaacaatgctgacctaggtgatacagccaattatacctgtgttgccagcaacattgcaggaaagactacaagagaatttattctcactgtaaatgttcctccaaacataaaggggggcccccagagccttgtaattcttttaaataagtcaactgtattggaatgcatcgctgaaggtgtgccaactccaaggataacatggagaaaggatggagctgttctagctgggaatcatgcaagatattccatcttggaaaatggattccttcatattcaatcagcacatgtcactgacactggacggtatttgtgtatggccaccaatgctgctggaacagatcgcaggcgaatagatttacaggtccatgttcctccatctattgctccgggtcctaccaacatgactgtaatagtaaatgttcaaactactctggcttgtgaggctactgggataccaaaaccatcaatcaattggagaaaaaatgggcatcttcttaatgtggatcaaaatcagaactcatacaggctcctttcttcaggttcactagtaattatttccccttctgtggatgacactgcaacctatgaatgtactgtgacaaacggtgctggagatgataaaagaactgtggatctcactgtccaagttccaccttccatagctgatgagcctacagatttcctagtaaccaaacatgccccagcagtaattacctgcactgcttcgggagttccatttccctcaattcactggaccaaaaatggtataagactgcttcccaggggagatggctatagaattctgtcctcaggagcaattgaaatacttgccacccaattaaaccatgctggaagatacacttgtgtcgctaggaatgcggctggctctgcacatcgacacgtsacccttcatgttcatgagcctccagtcattcagccccaaccaagtgaactacacgtcattctgaacaatcctattttattaccatgtgaagcaacagggacacccagtcctttcattacttggcaaaaagaaggcatcaatgttaacacttcaggcagaaaccatgcagttcttcctagtggcggcttacagatcwccagagctgtccgagaggatgctggcacttacatgtgtgtggcccagaacccggctggtacagccttgggcaaaatcaagttaaatgtccaagttcctccagtcattagccctcatctaaaggaatatgttattgctgtggacaagcccatcacgttatcctgtgaagcagatggcctccctccgcctgacattacatggcataaagatgggcgtgcaattgtggaatctatccgccagcgcgtcctcagctctggctctctgcaaatagcatttgtccagcctggtgatgctggccattacacgtgcatggcagccaatgtagcaggatcaagcagcacaagcaccaagctcaccgtccatgtaccacccaggatcagaagtacagaaggacactacacggtcaatgagaattcacaagccattcttccatgcgtagctgatggaatccccacaccagcaattaactggaaaaaagacaatgttcttttagctaacttgttaggaaaatacactgctgaaccatatggagaactcattttagaaaatgttgtgctggaggattctggcttctatacctgtgttgctaacaatgctgcaggtgaagatacacacactgtcagcctgactgtgcatgttctccccacttttactgaacttcctggagacgtgtcattaaataaaggagaacagctacgattaagctgtaaagctactggtattccattgcccaaattaacatggaccttcaataacaatattattccagcccactttgacagtgtgaatggacacagtgaacttgttattgaaagagtgtcaaaagaggattcaggtacttatgtgtgcaccgcagagaacagcgttggctttgtgaaggcaattggatttgtttatgtgaaagaacctccagtcttcaaaggtgattatccttctaactggattgaaccacttggtgggaatgcaatcctgaattgtgaggtgaaaggagaccccaccccaaccatccagtggaacagaaagggagtggatattgaaattagccacagaatccggcaactgggcaatggctccctggccatctatggcactgttaatgaagatgccggtgactatacatgtgtagctaccaatgaagctggggtggtggagcgcagcatgagtctgactctgcaaagtcctcctattatcactcttgagccagtggaaactgttattaatgctggtggcaaaatcatattgaattgtcaggcaactggagagcctcaaccaaccattacatggtcccgtcaagggcactctatttcctgggatgaccgggttaacgtgttgtccaacaactcattatatattgctgatgctcagaaagaagatacctctgaatttgaatgtgttgctcgaaacttaatgggttctgtccttgtcagagtgccagtcatagtccaggttcatggtggattttcccagtggtctgcatggagagcctgcagtgtcacctgtggaaaaggcatccaaaagaggagtcgtctgtgcaaccagccccttccagccaatggtgggaagccctgccaaggttcagatttggaaatgcgaaactgtcaaaataagccttgtccagtggatggtagctggtcggaatggagtctttgggaagaatgcacaaggagctgtggacgcggcaaccaaaccaggaccaggacttgcaataatccatcagttcagcatggtgggcggccatgtgaagggaatgctgtggaaataattatgtgcaacattaggccttgcccagttcatggagcatggagcgcttggcagccttggggaacatgcagcgaaagttgtgggaaaggtactcagacaagagcaagactttgtaataacccaccaccagcgtttggtgggtcctactgtgatggagcagaaacacagatgcaagtttgcaatgaaagaaattgtccaattcatggcaagtgggcgacttgggccagttggagtgcctgttctgtgtcatgtggaggaggtgccagacagagaacaaggggctgctccgaccctgtgccccagtatggaggaaggaaatgcgaagggagtgatgtccagagtgatttttgcaacagtgacccttgcccaacccatggtaactggagtccttggagtggctggggaacatgcagccggacgtgtaacggagggcagatgcggcggtaccgcacatgtgataaccctcctccctccaatgggggaagagcttgtgggggaccagactcccagatccagaggtgcaacactgacatgtgtcctgtggatggaagttggggaagctggcatagttggagccagtgctctgcctcctgtggaggaggtgaaaagactcggaagcggctgtgcgaccatcctgtgccagttaaaggtggccgtccctgtcccggagacactactcaggtgaccaggtgcaatgtacaagcatgtccaggtgggccccagcgagccagaggaagtgttattggaaatattaatgatgttgaatttggaattgctttccttaatgccacaataactgatagccctaactctgatactagaataatacgtgccaaaattaccaatgtacctcgtagtcttggttcagcaatgagaaagatagtttctattctaaatcccatttattggacaacagcaaaggaaataggagaagcagtcaatggctttaccctcaccaatgcagtcttcaaaagagaaactcaagtggaatttgcaactggagaaatcttgcagatgagtcatattgcccggggcttggattccgatggttctttgctgctagatatcgttgtgagtggctatgtcctacagcttcagtcacctgctgaagtcactgtaaaggattacacagaggactacattcaaacaggtcctgggcagctgtacgcctactcaacccggctgttcaccattgatggcatcagcatcccatacacatggaaccacaccgttttctatgatcaggcacagggaagaatgcctttcttggttgaaacacttcatgcatcctctgtggaatctgactataaccagatagaagagacactgggttttaaaattcatgcttcaatatccaaaggagatcgcagtaatcagtgcccctccgggtttaccttagactcagttggacctttttgtgctgatgaggatgaatgtgcagcagggaatccctgctcccatagctgccacaatgccatggggacttactactgctcctgccctaaaggcctcaccatagctgcagatggaagaacttgtcaagatattgatgagtgtgctttgggtaggcatacctgccacgctggtcaggactgtgacaatacgattggatcttatcgctgtgtggtccgttgtggaagtggctttcgaagaacctctgatgggctgagttgtcaagatattaatgaatgtcaagaatccagcccctgtcaccagcgctgtttcaatgccataggaagtttccattgtggatgtgaacctgggtatcagctcaaaggcagaaaatgcatggatgtgaacgagtgtagacaaaatgtatgcagaccagatcagcactgtaagaacacccgtggtggctataagtgcattgatctttgtccaaatggaatgaccaaggcagaaaatggaacctgtattgatattgatgaatgtaaagatgggacccatcagtgcagatataaccagatatgtgagaatacaagaggcagctatcgttgtgtatgcccaagaggttatcggtctcaaggagttggaagaccctgcatggatattgatgaatgtgaaaatacagatgcctgccagcatgagtgtaagaatacctttggaagttatcagtgcatctgcccacctggctatcaactcacacacaatggaaagacatgccaagatatcgatgaatgtctggagcagaatgtgcactgtggacccaatcgcatgtgcttcaacatgagaggaagctaccagtgcatcgatacaccctgtccacccaactaccaacgggatcctgtttcagggttctgcctcaagaactgtccacccaatgatttggaatgtgccttgagcccatatgccttggaatacaaactcgtctccctcccatttggaatagccaccaatcaagatttaatccggctggttgcatacacacaggatggagtgatgcatcccaggacaactttcctcatggtagatgaggaacagactgttccttttgccttgagggatgaaaacctgaaaggagtggtgtatacaacacgaccactacgagaagcagagacctaccgcatgagggtccgagcctcatcctacagtgccaatgggaccattgaatatcagaccacattcatagtttatatagctgtgtccgcctatccatactaa

SEQ ID NO: 59 - protein, 5518 aa, Homo sapiens
  VARIANT (1)...(5518): Xaa = Any Amino Acid
MISWEVVHTVFLFALLYSSLAQDASPQSEIRAEEIPEGASTLAFVFDVTGSMYDDLVQVIEGASKILETSLKRPKRPLFNFALVPFHDPEIGPVTITTDPKKFQYELRELYVQGGGDCPEMSIGAIKIALEIXLPGSFIYVFTDARSKDYRLTHEVLQLIQQKQSQVVFVLTGDCDDRTHIGYKVYEEIASTSSGQVFHLDKKQVNEVLKWVEEAVQASKVHLLSTDHLEQAVNTWRIPFDPSLKEVTVSLSGPSPMIEIRNPLGKLIKKGFGLHELLNIHNSAKVVNVKEPEAGMWTVKTSSSGRHSVRITGLSTIDFRAGFSRKPTLDFKKTVSRPVQGIPTYVLLNTSGISTPARIDLLELLSISGSSLKTXPVKYYPHRKPYGIWNISDFVPPNEAFFLKVTGYDKDDYLFQRVSSVSFSSIVPDAPKVTMPEKTPGYYLQPGQIPCSVDSLLPFTLSFVRNGVTLGVDQYLKESASVNLDIAKVTLSDEGFYECIAVSSAGTGRAQTFFDVSEPPPVIQVPNNVTVTPGERAVLTCLIISAVDYNLTWQRNDRDVRLAEPARIRTLANLSLELKSVKFNDAGEYHCMVSSEGGSSAASVFLTVQEPPKVTVMPKNQSFTGGSEVSIMCSATGYPKPKIAWTVNDMFIVGSHRYRMTSDGTLFIKNAAPKDAGIYGCLASNSAGTDXQNSTLRYIEAPKLMVVQSELLVALGDITVMECKTSGIPPPQVKWFKGDLELRPSTFLIIDPLLGLLKIQETQDLDAGDYTCVAINEAGRATGKITLDVGSPPVFIQEPADVSMEIGSNVTLPCYVQGYPEPTIKWRRLDNMPIFSRXFSVSSISQLRTGALFILNLWASDKGTYICEAENQFGKIQSETTVTVTGLVAPLIGISPSVANVIEGQQLTLPCTLLAGNPIPERRWIKNSAMLLQNPYITVRSDGSLHIERVQLQDGGEYTCVASNVAGTNNKTTSVVVHVLPTIQHGQQILSTIEGIPVTLPCKASGNPKPSVIWSKKGELISTSSAKFSAGADGSLYVVSPGGEESGEYVCTATNTAGYAKRKVQLTVYVRPRVFGDQRGLXQDKPVEISVLAGEEVTLPCEVKSLPPPIITWAKETQLISPFSPRHTFLPSGSMKITETRTSDSGMYLCVATNIAGNVTQAVKLNVHVPPKIQRGPKHLKVQVGQRVDIPCNAQGTPLPVITWSKGGSTMLVDGEHHVSNPDGTLSIDQATPSDAGIYTCVATNIAGTDETEITLHVQEPPXVEDLEPPYNTTFQERVANQRIEFPCPAKGTPKPTIKWLHNGRELTGREPGISILEDGTLLVIASVTPYDNGEYICVAVNEAGTTERKYNLKVHVPPVIKDKEQVTNVSVLLNQLTNLFCEVEGTPSPIIMWYKDNVQVTESSTIQTVNNGKILKLFRATPEDAGRYSCKAINIAGTSQKYFNIDVLVPPTIIGTNFPNEVSVVLNRDVALECQVKGTPFPDIHWFKDGKPLFLGDPNVELLDRGQVLHLKNARRNDKGRYQCTVSNAAGKQAKDIKLTIYIPPSIKGGNVTXXISVLINSLIKLECETRGLPMPAITWYKDGQPIMSSSQALYIDKGQYLHIPRAQVSDSATYTCHVANVAGTAEKSFHVDVYVPPMIEGNLATPLNKQVVIAHSLTLECKAAGNPSPILTWLKDGVPVKANDNIRIEAGGKKLEIMSAQEIDRGQYICVATSVAGEKEIKYEVDVLVPPAIEGGDETSYFIVMVNNLLELDCHVTGSPPPTIMWLKDGQLIDERDGFKILLNGRKLVIAQAQVSNTGLYRCMAANTAGDHKKEFEVTVHVPPTIKSSGLSERVVVKYKPVALQCIANGIPNPSITWLKDDQPVNTAQGNLKIQSSGRVLQIAKTLLEDAGRYTCVATNAAGETQQHIQLHVHEPPSLEDAGKMLNETVLVSNPVQLECKAAGNPVPVITWYKDNRLLSGSTSMTFLNRGQIIDIESAQISDAGIYKCVAINSAGATELFYSLQVHVAPSISGSNNMVAVVVNNPVRLECEARGIPAPSLTWLKDGSPVSSFSNGLQVLSGGRILALTSAQISDTGRYTCVAVNAAGEKQRDIDLRVYVPPNIMGEEQNVSVLISQAVELLCQSDAIPPPTLTWLKDGHPLLKKPGLSISENRSVLKIEDAQVQDTGRYTCEATNVAGKTEKNYNVNIWVPPNIGGSDELTQLTVIEGNLISLLCESSGIPPPNLIWKKKGSPVLTDSMGRXRILSGGRQLQISIAEKSDAALYSCVASNVAGTAKKEYNLQVYIRPTITNSGSHPTEIIVTRGKSISLECEVQGIPPPTVTWMKDGHPLIKAKGVEILDEGHILQLKNIHVSDTGRYVCVAVNVAGMTDKKYDLSVHAPPSIIGNHRSPENISVVEKNSVSLTCEASGIPLPSXTWFKDGWPVSLSNSVRILSGGRMLRLMQTTMEDAGQYTCVVRNAAGEERKIFGLSVLVPPHIVGENTLEDVKVKEKQSVTLTCEVTGNPVPEITWHKDGQPLQEDEAHHIISGGRFLQITNVQVPHTGRYTCLASSPAGHKSRSFSLNVFVSPTIAGVGSDGNPEDVTVILNSPTSLVCEAYSYPPATITWFKDGTPLESNRNIRILPGGRTLQILNAQEDNAGRYSCVATNEAGEMIKHYEVKVYIPPIINKGDLWGPGLSPKEVKIKVNNTLTLECEAYAIPSASLSWYKDGQPLKSDDHVNIAANGHTLQIKEAQISDTGRYTCVASNIAGEDELDFDVNIQVPPSFQKLWEIGNMLDTGRNGEAKDVIINNPISLYCETNAAPPPTLTWYKDGHPLTSSDKVLILPGGRVLQIPRAKVEDAGRYTCVAVNEAGEDSLQYDVRVLVPPIIKGANSDLPEEVTVLVNKSALIECLSSGSPAPRNSWQKDGQPLLEDDHHKFLSNGRILQILNTQITDIGRYVCVAENTAGSAKKYFNLNVHVPPSVIGPKSENLTVVVNNFISLTCEVSGFPPPDLSWLKNEQPIKLNTNTLIVPGGRTLQIIRAKVSDGGEYTCIAINQAGESKKKFSLTVYVPPSIKDHDSESLSVVNVREGTSVSLECESNAVPPPVITWYKNGRMITESTHVEILADGQMLHIKKAEVSDTGQYVCRAINVAGRDDKNFHLNVYVPPSIEGPEREVIVETISNPVTLTCDATGIPPPTIAWLKNHKRIENSDSLEVRILSGGSKLQIARSQHSDSGNYTCIASNMEGKAQKYYFLSIQVPPSVAGAEIPSDVSVLLGENVELVCNANGIPTPLIQWLKDGKPIASGETERIRVSANGSTLNIYGALTSDTGKYTCVATNPAGEEDRIFNLNVYVTPTIRGNKDEAEKLMTLVDTSINIECRATGTPPPQINWLKNGLPLPLSSHIRLLAAGQVIRIVRAQVSDVAVYTCVASNRAGVDNKHYNLQVFAPPNMDNSMGTEEITVLKGSSTSMACITDGTPAPSMAWLRDGQPLGLDAHLTVSTHGMVLQLLKAETEDSGKYTCIASNEAGEVSKHFILKVLEPPHINGSEEHEEISVIVNNPLELTCIASGIPAPKMTWMKDGRPLPQTDQVQTLGGGEVLRISTAQVEDTGRYTCLASSPAGDDDKEYLVRVHVPPNIAGTDEPRDITVLRNRQVTLECKSDAVPPPVITWLRNGERLQATPRVRILSGGRYLQINNADLGDTANYTCVASNIAGKTTREFILTVNVPPNIKGGPQSLVILLNKSTVLECIAEGVPTPRITWRKDGAVLAGNHARYSILENGFLHIQSAHVTDTGRYLCMATNAAGTDRRRIDLQVHVPPSIAPGPTNMTVIVNVQTTLACEATGIPKPSINWRKNGHLLNVDQNQNSYRLLSSGSLVIISPSVDDTATYECTVTNGAGDDKRTVDLTVQVPPSIADEPTDFLVTKHAPAVITCTASGVPFPSIHWTKNGIRLLPRGDGYRILSSGAIEILATQLNHAGRYTCVARNAAGSAHRHXTLHVHEPPVIQPQPSELHVILNNPILLPCEATGTPSPFITWQKEGINVNTSGRNHAVLPSGGLQIXRAVREDAGTYMCVAQNPAGTALGKIKLNVQVPPVISPHLKEYVIAVDKPITLSCEADGLPPPDITWHKDGRAIVESIRQRVLSSGSLQIAFVQPGDAGHYTCMAANVAGSSSTSTKLTVHVPPRIRSTEGHYTVNENSQAILPCVADGIPTPAINWKKDNVLLANLLGKYTAEPYGELILENVVLEDSGFYTCVANNAAGEDTHTVSLTVHVLPTFTELPGDVSLNKGEQLRLSCKATGIPLPKLTWTFNNNIIPAHFDSVNGHSELVIERVSKEDSGTYVCTAENSVGFVKAIGFVYVKEPPVFKGDYPSNWIEPLGGNAILNCEVKGDPTPTIQWNRKGVDIEISHRIRQLGNGSLAIYGTVNEDAGDYTCVATNEAGVVERSMSLTLQSPPIITLEPVETVINAGGKIILNCQATGEPQPTITWSRQGHSISWDDRVNVLSNNSLYIADAQKEDTSEFECVARNLMGSVLVRVPVIVQVHGGFSQWSAWRACSVTCGKGIQKRSRLCNQPLPANGGKPCQGSDLEMRNCQNKPCPVDGSWSEWSLWEECTRSCGRGNQTRTRTCNNPSVQHGGRPCEGNAVEIIMCNIRPCPVHGAWSAWQPWGTCSESCGKGTQTRARLCNNPPPAFGGSYCDGAETQMQVCNERNCPIHGKWATWASWSACSVSCGGGARQRTRGCSDPVPQYGGRKCEGSDVQSDFCNSDPCPTHGNWSPWSGWGTCSRTCNGGQMRRYRTCDNPPPSNGGRACGGPDSQIQRCNTDMCPVDGSWGSWHSWSQCSASCGGGEKTRKRLCDHPVPVKGGRPCPGDTTQVTRCNVQACPGGPQRARGSVIGNINDVEFGIAFLNATITDSPNSDTRIIRAKITNVPRSLGSAMRKIVSILNPIYWTTAKEIGEAVNGFTLTNAVFKRETQVEFATGEILQMSHIARGLDSDGSLLLDIVVSGYVLQLQSPAEVTVKDYTEDYIQTGPGQLYAYSTRLFTIDGISIPYTWNHTVFYDQAQGRMPFLVETLHASSVESDYNQIEETLGFKIHASISKGDRSNQCPSGFTLDSVGPFCADEDECAAGNPCSHSCHNAMGTYYCSCPKGLTIAADGRTCQDIDECALGRHTCHAGQDCDNTIGSYRCVVRCGSGFRRTSDGLSCQDINECQESSPCHQRCFNAIGSFHCGCEPGYQLKGRKCMDVNECRQNVCRPDQHCKNTRGGYKCIDLCPNGMTKAENGTCIDIDECKDGTHQCRYNQICENTRGSYRCVCPRGYRSQGVGRPCMDIDECENTDACQHECKNTFGSYQCICPPGYQLTHNGKTCQDIDECLEQNVHCGPNRMCFNMRGSYQCIDTPCPPNYQRDPVSGFCLKNCPPNDLECALSPYALEYKLVSLPFGIATNQDLIRLVAYTQDGVMHPRTTFLMVDEEQTVPFALRDENLKGVVYTTRPLREAETYRMRVRASSYSANGTIEYQTTFIVYIAVSAYPY

SEQ ID NO: 60 - DNA, 12381 bp, Homo sapiens
  CDS (1)...(12381)
atgtggtataaagataatgtccaggtgactgaaagcagcactattcagactgtgaacaatgggaagatactgaagctcttcagagccactccagaggatgcaggaagatattcctgcaaagcaattaatattgcaggcacttctcagaagtactttaacattgatgtgctagttccacccaccataataggtaccaacttcccaaatgaagtctcagttgtcctcaaccgtgacgtcgcccttgaatgccaggtcaaaggcactccctttcctgatattcattggttcaaagatggcaagcctttatttttgggcgatcctaatgttgaacttctagacagaggacaagtcttacatttaaagaatgcacggagaaatgacaaggggcgctaccaatgtactgtgtctaatgcagctggcaaacaagccaaggatataaaactgactatctatattccacctagtattaaaggaggaaatgtcaccacrgmcatatcagtattgatcaacagccttattaaactggaatgtgaaacacggggacttccaatgcctgccattacttggtataaggacgggcagccaatcatgtccagctcacaagcactttatattgataaaggacaatatcttcatattcctcgagcacaggtctctgattcagcaacatatacgtgtcaygtagccaatgttgctggaactgctgaaaaatcattccatgtggatgtctatgttcctccaatgattgaaggcaacttggccacgcctttgaataagcaagtagttattgctcattctctgacactggagtgcaaagctgctggaaacccttctcccattctcacctggttgaaagatggtgtacctgtgaaagctaatgacaatatccgcatagaagctggtgggaagaaactcgaaatcatgagtgcccaagaaattgatcgaggacagtacatatgcgtggctaccagtgtggcaggagaaaaggaaatcaaatatgaagttgatgtcttggtgccaccagctatagaaggaggagatgaaacatcttacttcattgtgatggttaataacttactggagctagattgtcatgtgacaggctctcccccaccaactatcatgtggctgaaggatggccagttaattgatgaaagggatggattcaagattttattaaatggacgcaaactggttattgctcaggctcaagtgtcaaacacaggcctttatcggtgcatggcagcaaatactgctggagaccacaagaaggaatttgaagtgactgttcatgttcctccaacaatcaagtcctcaggcctttctgagagagttgtggtaaaatacaagcctgtcgccttgcagtgcatagccaatgggattccaaatccttccattacatggttaaaagatgaccagcctgtgaacactgcccaaggaaaccttaaaatacagtcttctggtcgagttctacaaattgccaaaaccctgttggaagatgctggcagatacacatgtgtggctaccaacgcagctggagaaacacaacagcacattcaactgcatgttcatgaaccacctagtctggaagatgctggaaaaatgctgaatgagactgtgttggtgagcaaccctgtacagctggagtgtaaggcagctggaaatcctgtgcctgttattacatggtacaaagataatcgtctactctcaggttccaccagcatgactttcttgaacagaggacagatcattgatattgaaagtgcccagatctcagatgctggcatatataaatgcgtggccatcaactcagctggagctacagagttattttacagtctgcaagttcatgtggccccatcaatttctggcagcaataacatggtggcagtggtggttaataacccggtgaggttagaatgtgaagccagaggtattcctgccccaagtctgacctggttgaaagatgggagtcctgtttctagtttttctaatggattacaggttctctctggtggtcgaatcctagcattgaccagtgcacaaatcagcgacacaggaaggtacacctgcgtggcagtgaatgctgctggagaaaagcaaagggacattgacctccgagtatatgttccgccaaatattatgggagaagaacagaatgtctctgtcctcattagccaagctgtggaattactatgtcaaagtgatgctattcccccacctactcttacttggttaaaagacggccaccccttgctgaagaaaccaggcctcagtatatctgaaaatagaagtgtgttaaagattgaagatgctcaggttcaagacactggtcgttacacttgtgaagcaacaaatgttgctggaaaaactgaaaaaaactacaatgtcaacatttgggtccccccaaatattggtggttctgatgaacttactcaacttacagtcattgaagggaatctcattagtctgttgtgtgaatcaagtggtattccacccccaaatctcatctggaagaagaaaggctctccagtgctgactgattccatggggcgagytagaattttatctgggggcaggcaattacaaatttcaattgctgaaaagtctgatgcagcactctattcatgtgtggcgtcgaatgttgctgggactgcaaagaaagaatacaatctgcaagtttacattagaccaaccataaccaacagtggcagccaccctactgaaattattgtgacccgagggaagagtatctccttggagtgtgaggtgcagggtattccaccaccaacagtgacctggatgaaagatggccaccccttgatcaaggcaaagggagtagaaatactggatgaaggtcacatccttcagctgaagaacattcatgtatctgacacaggccgttatgtgtgtgttgctgtgaatgtagcaggaatgactgacaaaaaatatgacttaagtgtccatgctcctccaagcatcataggaaaccacaggtcacctgaaaatattagtgtggtagaaaagaactcagtatctttgacttgtgaagcttctggaattcccctgccttccayaacctggttcaaagatgggtggcctgtcagccttagcaattctgtgaggattctttcaggaggcaggatgctacggctgatgcagaccacaatggaagatgctggccaatatacttgcgttgtaaggaatgcagctggtgaagaaagaaaaatctttgggctttcagtattagtaccacctcatattgtgggtgaaaatacattggaagatgtgaaggtaaaagagaaacagagtgttacgctgacttgtgaagtgacagggaatccagtgccagaaattacatggcacaaagatgggcagcccctccaagaagatgaagcccatcacattatatctggtggccgttttcttcaaattaccaatgtccaggtgccacacactggaagatatacatgtttggcttccagtccagctggccacaagagcaggagcttcagtcttaatgtatttgtatctcctacaattgctggtgtaggtagtgatggcaaccctgaagatgtcactgtcatccttaacagccctacatctttggtctgtgaagcttattcatatcctccagctaccatcacctggtttaaggatggcactcctttagaatctaaccgaaatattcgtattcttccaggaggcagaactctgcagatcctcaatgcacaggaggacaatgctggaagatactcttgtgtagccacgaatgaggctggagaaatgataaagcactatgaagtgaaggtgtacattccacccataatcaataaaggggacctttgggggccaggtctttcccctaaagaagtgaagatcaaagtaaacaacactctgaccttggaatgtgaagcgtatgcaattccttctgcctccctcagctggtacaaggatggacagccccttaaatccgatgatcatgttaatattgctgcgaatggacacacacttcaaataaaggaggctcaaatatcagacaccggacgatatacttgtgtagcatctaacattgcaggtgaagatgagttggattttgatgtgaatattcaagttcctccaagttttcagaaactctgggaaataggaaacatgctagatactggcaggaatggtgaagccaaagatgtgatcatcaacaatcccatttctctttactgtgagacaaatgctgctccccctcctacactgacatggtacaaagatggccaccctctgacctcaagtgataaagtattgattttgccaggagggcgagtgttgcagattcctcgggctaaagtagaagatgctgggagatacacatgtgtggctgtgaatgaggctggagaagattcccttcaatatgatgtccgtgtactcgtgccgccaattatcaagggagcaaatagtgatctccctgaagaggtcaccgtgctggtgaacaagagtgcactgatagagtgtttatccagtggcagcccagcaccaaggaattcctggcagaaagatggacagcccttgctagaagatgaccatcataaatttctatctaatggacgaattctgcagattctgaatactcaaataacagatatcggcaggtatgtgtgtgttgctgagaacacagctgggagtgccaaaaaatattttaacctcaatgttcatgttcctccaagtgtcattggtcctaaatctgaaaatcttaccgtcgtggtgaacaatttcatctctttgacctgtgaggtctctggttttccacctcctgacctcagctggctcaagaatgaacagcccatcaaactgaacacaaatactctcattgtgcctggtggtcgaactctacagattattcgggccaaggtatcagatggtggtgaatacacttgtatagctatcaatcaagctggcgaaagcaagaaaaagttttccctgactgtttatgtgcccccaagcattaaagaccatgacagtgaatctctttctgtagttaatgtaagagagggaacttctgtgtctttggagtgtgagtcgaacgctgtgccacctccagtcatcacttggtataagaatgggcggatgataacagagtctactcatgtggagattttagctgatggacaaatgctacacattaagaaagctgaggtatctgacacaggccagtatgtatgtagagctataaatgtagcaggacgggatgataaaaatttccacctcaatgtatatgtgccacccagtattgaaggacctgaaagagaagtgattgtggagacgatcagcaatcctgtgacattaacatgtgatgccactgggatcccacctcccacgatagcatggttaaagaaccacaagcgcatagaaaattctgactcactggaagttcgtattttgtctggaggtagcaaactccagattgcccggtctcagcattcagatagtggaaactatacatgtattgcttcaaatatggagggaaaagcccagaaatattactttctttcaattcaagttcctccaagtgttgctggtgctgaaattccaagtgatgtcagtgtccttctaggagaaaatgttgagctggtctgcaatgcaaatggcattcctactccacttattcaatggcttaaagatggaaagcccatagctagtggtgaaacagaaagaatccgagtgagtgcaaatggcagcacattaaacatttatggagctcttacatctgacacggggaaatacacatgtgttgctactaatcccgctggagaagaagaccgaatttttaacttgaatgtctatgttacacctacaattaggggtaataaagatgaagcagagaaactaatgactttagtggatacttcaataaatattgaatgcagagccacagggacgcctccaccacagataaactggctgaagaatggacttcctctgcctctctcctcccatatccggttactggcagcaggacaagttatcaggattgtgagagctcaggtgtctgatgtcgctgtgtatacttgtgtggcctccaacagagctggggtggataataagcattacaatcttcaagtgtttgcaccaccaaatatggacaattcaatggggacagaggaaatcacagttctcaaaggtagttccacctctatggcatgcattactgatggaaccccagctcccagtatggcctggcttagagatggccagcctctggggcttgatgcccatctgacagtcagcacccatggaatggtcctgcagctcctcaaagcagagactgaagattcgggaaagtacacctgcattgcctcaaatgaagctggagaagtcagcaagcactttatcctcaaggtcctagaaccacctcacattaatggatctgaagaacatgaagagatatcagtaattgttaataacccacttgaacttacctgcattgcttctggaatcccagcccctaaaatgacctggatgaaagatggccggccccttccacagacggatcaagtgcaaactctaggaggaggagaggttcttcgaatttctactgctcaggtggaggatacaggaagatatacatgtctggcatccagtcctgcaggagatgatgataaggaatatctagtgagagtgcatgtacctcctaatattgctggaactgatgagccccgggatatcactgtgttacggaacagacaagtgacattggaatgcaagtcagatgcagtgcccccacctgtaattacttggctcagaaatggagaacggttacaggcaacacctcgagtgcgaatcctatctggagggagatacttgcaaatcaacaatgctgacctaggtgatacagccaattatacctgtgttgccagcaacattgcaggaaagactacaagagaatttattctcactgtaaatgttcctccaaacataaaggggggcccccagagccttgtaattcttttaaataagtcaactgtattggaatgcatcgctgaaggtgtgccaactccaaggataacatggagaaaggatggagctgttctagctgggaatcatgcaagatattccatcttggaaaatggattccttcatattcaatcagcacatgtcactgacactggacggtatttgtgtatggccaccaatgctgctggaacagatcgcaggcgaatagatttacaggtccatgttcctccatctattgctccgggtcctaccaacatgactgtaatagtaaatgttcaaactactctggcttgtgaggctactgggataccaaaaccatcaatcaattggagaaaaaatgggcatcttcttaatgtggatcaaaatcagaactcatacaggctcctttcttcaggttcactagtaattatttccccttctgtggatgacactgcaacctatgaatgtactgtgacaaacggtgctggagatgataaaagaactgtggatctcactgtccaagttccaccttccatagctgatgagcctacagatttcctagtaaccaaacatgccccagcagtaattacctgcactgcttcgggagttccatttccctcaattcactggaccaaaaatggtataagactgcttcccaggggagatggctatagaattctgtcctcaggagcaattgaaatacttgccacccaattaaaccatgctggaagatacacttgtgtcgctaggaatgcggctggctctgcacatcgacacgtsacccttcatgttcatgagcctccagtcattcagccccaaccaagtgaactacacgtcattctgaacaatcctattttattaccatgtgaagcaacagggacacccagtcctttcattacttggcaaaaagaaggcatcaatgttaacacttcaggcagaaaccatgcagttcttcctagtggcggcttacagatcwccagagctgtccgagaggatgctggcacttacatgtgtgtggcccagaacccggctggtacagccttgggcaaaatcaagttaaatgtccaagttcctccagtcattagccctcatctaaaggaatatgttattgctgtggacaagcccatcacgttatcctgtgaagcagatggcctccctccgcctgacattacatggcataaagatgggcgtgcaattgtggaatctatccgccagcgcgtcctcagctctggctctctgcaaatagcatttgtccagcctggtgatgctggccattacacgtgcatggcagccaatgtagcaggatcaagcagcacaagcaccaagctcaccgtccatgtaccacccaggatcagaagtacagaaggacactacacggtcaatgagaattcacaagccattcttccatgcgtagctgatggaatccccacaccagcaattaactggaaaaaagacaatgttcttttagctaacttgttaggaaaatacactgctgaaccatatggagaactcattttagaaaatgttgtgctggaggattctggcttctatacctgtgttgctaacaatgctgcaggtgaagatacacacactgtcagcctgactgtgcatgttctccccacttttactgaacttcctggagacgtgtcattaaataaaggagaacagctacgattaagctgtaaagctactggtattccattgcccaaattaacatggaccttcaataacaatattattccagcccactttgacagtgtgaatggacacagtgaacttgttattgaaagagtgtcaaaagaggattcaggtacttatgtgtgcaccgcagagaacagcgttggctttgtgaaggcaattggatttgtttatgtgaaagaacctccagtcttcaaaggtgattatccttctaactggattgaaccacttggtgggaatgcaatcctgaattgtgaggtgaaaggagaccccaccccaaccatccagtggaacagaaagggagtggatattgaaattagccacagaatccggcaactgggcaatggctccctggccatctatggcactgttaatgaagatgccggtgactatacatgtgtagctaccaatgaagctggggtggtggagcgcagcatgagtctgactctgcaaagtcctcctattatcactcttgagccagtggaaactgttattaatgctggtggcaaaatcatattgaattgtcaggcaactggagagcctcaaccaaccattacatggtcccgtcaagggcactctatttcctgggatgaccgggttaacgtgttgtccaacaactcattatatattgctgatgctcagaaagaagatacctctgaatttgaatgtgttgctcgaaacttaatgggttctgtccttgtcagagtgccagtcatagtccaggttcatggtggattttcccagtggtctgcatggagagcctgcagtgtcacctgtggaaaaggcatccaaaagaggagtcgtctgtgcaaccagccccttccagccaatggtgggaagccctgccaaggttcagatttggaaatgcgaaactgtcaaaataagccttgtccagtggatggtagctggtcggaatggagtctttgggaagaatgcacaaggagctgtggacgcggcaaccaaaccaggaccaggacttgcaataatccatcagttcagcatggtgggcggccatgtgaagggaatgctgtggaaataattatgtgcaacattaggccttgcccagttcatggagcatggagcgcttggcagccttggggaacatgcagcgaaagttgtgggaaaggtactcagacaagagcaagactttgtaataacccaccaccagcgtttggtgggtcctactgtgatggagcagaaacacagatgcaagtttgcaatgaaagaaattgtccaattcatggcaagtgggcgacttgggccagttggagtgcctgttctgtgtcatgtggaggaggtgccagacagagaacaaggggctgctccgaccctgtgccccagtatggaggaaggaaatgcgaagggagtgatgtccagagtgatttttgcaacagtgacccttgcccaacccatggtaactggagtccttggagtggctggggaacatgcagccggacgtgtaacggagggcagatgcggcggtaccgcacatgtgataaccctcctccctccaatgggggaagagcttgtgggggaccagactcccagatccagaggtgcaacactgacatgtgtcctgtggatggaagttggggaagctggcatagttggagccagtgctctgcctcctgtggaggaggtgaaaagactcggaagcggctgtgcgaccatcctgtgccagttaaaggtggccgtccctgtcccggagacactactcaggtgaccaggtgcaatgtacaagcatgtccaggtgggccccagcgagccagaggaagtgttattggaaatattaatgatgttgaatttggaattgctttccttaatgccacaataactgatagccctaactctgatactagaataatacgtgccaaaattaccaatgtacctcgtagtcttggttcagcaatgagaaagatagtttctattctaaatcccatttattggacaacagcaaaggaaataggagaagcagtcaatggctttaccctcaccaatgcagtcttcaaaagagaaactcaagtggaatttgcaactggagaaatcttgcagatgagtcatattgcccggggcttggattccgatggttctttgctgctagatatcgttgtgagtggctatgtcctacagcttcagtcacctgctgaagtcactgtaaaggattacacagaggactacattcaaacaggtcctgggcagctgtacgcctactcaacccggctgttcaccattgatggcatcagcatcccatacacatggaaccacaccgttttctatgatcaggcacagggaagaatgcctttcttggttgaaacacttcatgcatcctctgtggaatctgactataaccagatagaagagacactgggttttaaaattcatgcttcaatatccaaaggagatcgcagtaatcagtgcccctccgggtttaccttagactcagttggacctttttgtgctgatgaggatgaatgtgcagcagggaatccctgctcccatagctgccacaatgccatggggacttactactgctcctgccctaaaggcctcaccatagctgcagatggaagaacttgtcaagatattgatgagtgtgctttgggtaggcatacctgccacgctggtcaggactgtgacaatacgattggatcttatcgctgtgtggtccgttgtggaagtggctttcgaagaacctctgatgggctgagttgtcaagatattaatgaatgtcaagaatccagcccctgtcaccagcgctgtttcaatgccataggaagtttccattgtggatgtgaacctgggtatcagctcaaaggcagaaaatgcatggatgtgaacgagtgtagacaaaatgtatgcagaccagatcagcactgtaagaacacccgtggtggctataagtgcattgatctttgtccaaatggaatgaccaaggcagaaaatggaacctgtattgatattgatgaatgtaaagatgggacccatcagtgcagatataaccagatatgtgagaatacaagaggcagctatcgttgtgtatgcccaagaggttatcggtctcaaggagttggaagaccctgcatggatattgatgaatgtgaaaatacagatgcctgccagcatgagtgtaagaatacctttggaagttatcagtgcatctgcccacctggctatcaactcacacacaatggaaagacatgccaagatatcgatgaatgtctggagcagaatgtgcactgtggacccaatcgcatgtgcttcaacatgagaggaagctaccagtgcatcgatacaccctgtccacccaactaccaacgggatcctgtttcagggttctgcctcaagaactgtccacccaatgatttggaatgtgccttgagcccatatgccttggaatacaaactcgtctccctcccatttggaatagccaccaatcaagatttaatccggctggttgcatacacacaggatggagtgatgcatcccaggacaactttcctcatggtagatgaggaacagactgttccttttgccttgagggatgaaaacctgaaaggagtggtgtatacaacacgaccactacgagaagcagagacctaccgcatgagggtccgagcctcatcctacagtgccaatgggaccattgaatatcagaccacattcatagtttatatagctgtgtccgcctatccatactaa

SEQ ID NO: 61 - protein, 4126 aa, Homo sapiens
  VARIANT (1)...(4126): Xaa = Any Amino Acid
MWYKDNVQVTESSTIQTVNNGKILKLFRATPEDAGRYSCKAINIAGTSQKYFNIDVLVPPTIIGTNFPNEVSVVLNRDVALECQVKGTPFPDIHWFKDGKPLFLGDPNVELLDRGQVLHLKNARRNDKGRYQCTVSNAAGKQAKDIKLTIYIPPSIKGGNVTXXISVLINSLIKLECETRGLPMPAITWYKDGQPIMSSSQALYIDKGQYLHIPRAQVSDSATYTCHVANVAGTAEKSFHVDVYVPPMIEGNLATPLNKQVVIAHSLTLECKAAGNPSPILTWLKDGVPVKANDNIRIEAGGKKLEIMSAQEIDRGQYICVATSVAGEKEIKYEVDVLVPPAIEGGDETSYFIVMVNNLLELDCHVTGSPPPTIMWLKDGQLIDERDGFKILLNGRKLVIAQAQVSNTGLYRCMAANTAGDHKKEFEVTVHVPPTIKSSGLSERVVVKYKPVALQCIANGIPNPSITWLKDDQPVNTAQGNLKIQSSGRVLQIAKTLLEDAGRYTCVATNAAGETQQHIQLHVHEPPSLEDAGKMLNETVLVSNPVQLECKAAGNPVPVITWYKDNRLLSGSTSMTFLNRGQIIDIESAQISDAGIYKCVAINSAGATELFYSLQVHVAPSISGSNNMVAVVVNNPVRLECEARGIPAPSLTWLKDGSPVSSFSNGLQVLSGGRILALTSAQISDTGRYTCVAVNAAGEKQRDIDLRVYVPPNIMGEEQNVSVLISQAVELLCQSDAIPPPTLTWLKDGHPLLKKPGLSISENRSVLKIEDAQVQDTGRYTCEATNVAGKTEKNYNVNIWVPPNIGGSDELTQLTVIEGNLISLLCESSGIPPPNLIWKKKGSPVLTDSMGRXRILSGGRQLQISIAEKSDAALYSCVASNVAGTAKKEYNLQVYIRPTITNSGSHPTEIIVTRGKSISLECEVQGIPPPTVTWMKDGHPLIKAKGVEILDEGHILQLKNIHVSDTGRYVCVAVNVAGMTDKKYDLSVHAPPSIIGNHRSPENISVVEKNSVSLTCEASGIPLPSXTWFKDGWPVSLSNSVRILSGGRMLRLMQTTMEDAGQYTCVVRNAAGEERKIFGLSVLVPPHIVGENTLEDVKVKEKQSVTLTCEVTGNPVPEITWHKDGQPLQEDEAHHIISGGRFLQITNVQVPHTGRYTCLASSPAGHKSRSFSLNVFVSPTIAGVGSDGNPEDVTVILNSPTSLVCEAYSYPPATITWFKDGTPLESNRNIRILPGGRTLQILNAQEDNAGRYSCVATNEAGEMIKHYEVKVYIPPIINKGDLWGPGLSPKEVKIKVNNTLTLECEAYAIPSASLSWYKDGQPLKSDDHVNIAANGHTLQIKEAQISDTGRYTCVASNIAGEDELDFDVNIQVPPSFQKLWEIGNMLDTGRNGEAKDVIINNPISLYCETNAAPPPTLTWYKDGHPLTSSDKVLILPGGRVLQIPRAKVEDAGRYTCVAVNEAGEDSLQYDVRVLVPPIIKGANSDLPEEVTVLVNKSALIECLSSGSPAPRNSWQKDGQPLLEDDHHKFLSNGRILQILNTQITDIGRYVCVAENTAGSAKKYFNLNVHVPPSVIGPKSENLTVVVNNFISLTCEVSGFPPPDLSWLKNEQPIKLNTNTLIVPGGRTLQIIRAKVSDGGEYTCIAINQAGESKKKFSLTVYVPPSIKDHDSESLSVVNVREGTSVSLECESNAVPPPVITWYKNGRMITESTHVEILADGQMLHIKKAEVSDTGQYVCRAINVAGRDDKNFHLNVYVPPSIEGPEREVIVETISNPVTLTCDATGIPPPTIAWLKNHKRIENSDSLEVRILSGGSKLQIARSQHSDSGNYTCIASNMEGKAQKYYFLSIQVPPSVAGAEIPSDVSVLLGENVELVCNANGIPTPLIQWLKDGKPIASGETERIRVSANGSTLNIYGALTSDTGKYTCVATNPAGEEDRIFNLNVYVTPTIRGNKDEAEKLMTLVDTSINIECRATGTPPPQINWLKNGLPLPLSSHIRLLAAGQVIRIVRAQVSDVAVYTCVASNRAGVDNKHYNLQVFAPPNMDNSMGTEEITVLKGSSTSMACITDGTPAPSMAWLRDGQPLGLDAHLTVSTHGMVLQLLKAETEDSGKYTCIASNEAGEVSKHFILKVLEPPHINGSEEHEEISVIVNNPLELTCIASGIPAPKMTWMKDGRPLPQTDQVQTLGGGEVLRISTAQVEDTGRYTCLASSPAGDDDKEYLVRVHVPPNIAGTDEPRDITVLRNRQVTLECKSDAVPPPVITWLRNGERLQATPRVRILSGGRYLQINNADLGDTANYTCVASNIAGKTTREFILTVNVPPNIKGGPQSLVILLNKSTVLECIAEGVPTPRITWRKDGAVLAGNHARYSILENGFLHIQSAHVTDTGRYLCMATNAAGTDRRRIDLQVHVPPSIAPGPTNMTVIVNVQTTLACEATGIPKPSINWRKNGHLLNVDQNQNSYRLLSSGSLVIISPSVDDTATYECTVTNGAGDDKRTVDLTVQVPPSIADEPTDFLVTKHAPAVITCTASGVPFPSIHWTKNGIRLLPRGDGYRILSSGAIEILATQLNHAGRYTCVARNAAGSAHRHXTLHVHEPPVIQPQPSELHVILNNPILLPCEATGTPSPFITWQKEGINVNTSGRNHAVLPSGGLQIXRAVREDAGTYMCVAQNPAGTALGKIKLNVQVPPVISPHLKEYVIAVDKPITLSCEADGLPPPDITWHKDGRAIVESIRQRVLSSGSLQIAFVQPGDAGHYTCMAANVAGSSSTSTKLTVHVPPRIRSTEGHYTVNENSQAILPCVADGIPTPAINWKKDNVLLANLLGKYTAEPYGELILENVVLEDSGFYTCVANNAAGEDTHTVSLTVHVLPTFTELPGDVSLNKGEQLRLSCKATGIPLPKLTWTFNNNIIPAHFDSVNGHSELVIERVSKEDSGTYVCTAENSVGFVKAIGFVYVKEPPVFKGDYPSNWIEPLGGNAILNCEVKGDPTPTIQWNRKGVDIEISHRIRQLGNGSLAIYGTVNEDAGDYTCVATNEAGVVERSMSLTLQSPPIITLEPVETVINAGGKIILNCQATGEPQPTITWSRQGHSISWDDRVNVLSNNSLYIADAQKEDTSEFECVARNLMGSVLVRVPVIVQVHGGFSQWSAWRACSVTCGKGIQKRSRLCNQPLPANGGKPCQGSDLEMRNCQNKPCPVDGSWSEWSLWEECTRSCGRGNQTRTRTCNNPSVQHGGRPCEGNAVEIIMCNIRPCPVHGAWSAWQPWGTCSESCGKGTQTRARLCNNPPPAFGGSYCDGAETQMQVCNERNCPIHGKWATWASWSACSVSCGGGARQRTRGCSDPVPQYGGRKCEGSDVQSDFCNSDPCPTHGNWSPWSGWGTCSRTCNGGQMRRYRTCDNPPPSNGGRACGGPDSQIQRCNTDMCPVDGSWGSWHSWSQCSASCGGGEKTRKRLCDHPVPVKGGRPCPGDTTQVTRCNVQACPGGPQRARGSVIGNINDVEFGIAFLNATITDSPNSDTRIIRAKITNVPRSLGSAMRKIVSILNPIYWTTAKEIGEAVNGFTLTNAVFKRETQVEFATGEILQMSHIARGLDSDGSLLLDIVVSGYVLQLQSPAEVTVKDYTEDYIQTGPGQLYAYSTRLFTIDGISIPYTWNHTVFYDQAQGRMPFLVETLHASSVESDYNQIEETLGFKIHASISKGDRSNQCPSGFTLDSVGPFCADEDECAAGNPCSHSCHNAMGTYYCSCPKGLTIAADGRTCQDIDECALGRHTCHAGQDCDNTIGSYRCVVRCGSGFRRTSDGLSCQDINECQESSPCHQRCFNAIGSFHCGCEPGYQLKGRKCMDVNECRQNVCRPDQHCKNTRGGYKCIDLCPNGMTKAENGTCIDIDECKDGTHQCRYNQICENTRGSYRCVCPRGYRSQGVGRPCMDIDECENTDACQHECKNTFGSYQCICPPGYQLTHNGKTCQDIDECLEQNVHCGPNRMCFNMRGSYQCIDTPCPPNYQRDPVSGFCLKNCPPNDLECALSPYALEYKLVSLPFGIATNQDLIRLVAYTQDGVMHPRTTFLMVDEEQTVPFALRDENLKGVVYTTRPLREAETYRMRVRASSYSANGTIEYQTTFIVYIAVSAYPY

SEQ ID NO: 62 - DNA, 261 bp, Homo sapiens
  CDS (1)...(261)
atgagagcaacagccatagtcctactcttggctctgacacttgcaaccatgttcagtatagaatgtgccaaacagacgaaacagatggttgactgcagtcattataaaaagttaccaccaggacaacagagattttgtcatcatatgtatgatccaatttgtggatctgatggcaaaacttataaaaatgattgcttcttctgttctaaagttaagaaaactgacggcacacttaaatttgtacattttggaaaatgttaa

SEQ ID NO: 63 - protein, 86 aa, Homo sapiens
MRATAIVLLLALTLATMFSIECAKQTKQMVDCSHYKKLPPGQQRFCHHMYDPICGSDGKTYKNDCFFCSKVKKTDGTLKFVHFGKC

SEQ ID NO: 64 - DNA, 213 bp, Homo sapiens
  CDS (1)...(213)
atgttcagtatagaatgtgccaaacagacgaaacagatggttgactgcagtcattataaaaagttaccaccaggacaacagagattttgtcatcatatgtatgatccaatttgtggatctgatggcaaaacttataaaaatgattgcttcttctgttctaaagttaagaaaactgacggcacacttaaatttgtacattttggaaaatgttaa

SEQ ID NO: 65 - protein, 70 aa, Homo sapiens
MFSIECAKQTKQMVDCSHYKKLPPGQQRFCHHMYDPICGSDGKTYKNDCFFCSKVKKTDGTLKFVHFGKC

SEQ ID NO: 66 - DNA, 614 bp, Homo sapiens
gcatgtgcaattacctgtctttcacaagaaaagaatccccatggctcgcagacatttctgacctctttctggagttgtactacttagaaattgctatttcacaattgaggcaggaattcttgaaaatatataaggcaggatcaaagtgagctggacggacaccaggtcacttcttttccctacatctgactgccttggccacttcagtactatgagagcaacagccatagtcctactcttggctctgacacttgcaaccatgttcagtatagaatgtgccaaacagacgaaacagatggttgactgcagtcattataaaaagttaccaccaggacaacagagattttgtcatcatatgtatgatccaatttgtggatctgatggcaaaacttataaaaatgattgcttcttctgttctaaagttaagaaaactgacggcacacttaaatttgtacattttggaaaatgttaaatctatcttgtgagtccaaaatatcttttaatgcatctattcacaagagtcacatttctgttcccatattatctatgccacattgcctactcatcaccatatgtagatttctttgtagaataaagcagatataagggaaaaa

SEQ ID NO: 67 - DNA, 1215 bp, Homo sapiens
  CDS (1)...(1215)
atgccgcctttcctgatcaccctcttcctctttcactcttgctgcctccgagcaaatggccacctccgtgaaggaatgacattgctgaagactgagtttgcacttcacctctaccagagtgtggccgcgtgtagaaatgagacgaactttgtcatctctcctgctggtgtgtccctccccctggagatcctgcagtttggagcagaagggagcactggtcagcagctggcagatgccctggggtacactgtccatgacaaaagggtgaaagatttcttgcatgctgtttatgccacactacccacctccagccaaggcaccgagatggagctggcctgcagcctttttgtgcaagtgggaacgccactgtccccctgctttgtggagcacgtctcctggtgggctaacagcagcctggaaccagccgacctcagtgagcccaatagcaccgccatccagactagcgaaggggcctccagagagactgcaggtgggggccccagtgagggccctggtggctggccgtgggagcaagtcagtgcagcatttgctcagcttgtgcttgtgagcaccatgtccttccaaggcacttggcgaaagagattctcctccacagacacacagatcctgcctttcacctgtgcctatggcctcgtccttcaggtccccatgatgcaccaaacgaccgaggtcaactacggtcagttccaggacactgcaggccatcaggtgggggtgctggagcttccttacctgggaagtgcagtgagtctgttcctggtgctgccccgtgacaaagacacccccctgagccacatcgagccacacctcacagccagcaccatccacctctggaccaccagcctgaggagagccaggatggatgtgttcctgcccaggtttaggatccaaaatcaattcaacttaaaaagcattttaaattcttggggagtcaccgatctttttgatccactcaaagctaacttgaaaggaatttcaggccaagatggcttttatgtttctgaagcaatccacaaggccaagattgaagttttggaggaaggcaccaaggcatctggagccacagctctgttgttattgaaaaggtctcggattcctatttttaaagcagatcggccattcatctatttcctgagagaacctaacacagggtttgtcttcagtattgggagagtttcaaatcccctagactaa

SEQ ID NO: 68 - protein, 404 aa, Homo sapiens
MPPFLITLFLFHSCCLRANGHLREGMTLLKTEFALHLYQSVAACRNETNFVISPAGVSLPLEILQFGAEGSTGQQLADALGYTVHDKRVKDFLHAVYATLPTSSQGTEMELACSLFVQVGTPLSPCFVEHVSWWANSSLEPADLSEPNSTAIQTSEGASRETAGGGPSEGPGGWPWEQVSAAFAQLVLVSTMSFQGTWRKRFSSTDTQILPFTCAYGLVLQVPMMHQTTEVNYGQFQDTAGHQVGVLELPYLGSAVSLFLVLPRDKDTPLSHIEPHLTASTIHLWTTSLRRARMDVFLPRFRIQNQFNLKSILNSWGVTDLFDPLKANLKGISGQDGFYVSEAIHKAKIEVLEEGTKASGATALLLLKRSRIPIFKADRPFIYFLREPNTGFVFSIGRVSNPLD

SEQ ID NO: 69 - DNA, 1089 bp, Homo sapiens
  CDS (1)...(1089)
atgccgcctttcctgatcaccctcttcctctttcactcttgctgcctccgagcaaatggccacctccgtgaaggaatgacattgctgaagactgagtttgcacttcacctctaccagagtgtggccgcgtgtagaaatgagacgaactttgtcatctctcctgctggtgtgtccctccccctggagatcctgcagtttggagcagaagggagcactggtcagcagctggcagatgccctggggtacactgtccatgacaaaagggtgaaagatttcttgcatgctgtttatgccacactacccacctccagccaaggcaccgagatggagctggcctgcagcctttttgtgcaagtgggaacgccactgtccccctgctttgtggagcacgtctcctggtgggctaacagcagcctggaaccagccgacctcagtgagcccaatagcaccgccatccagactagcgaaggggcctccagagagactgcagacacacagatcctgcctttcacctgtgcctatggcctcgtccttcaggtccccatgatgcaccaaacgaccgaggtcaactacggtcagttccaggacactgcaggccatcaggtgggggtgctggagcttccttacctgggaagtgcagtgagtctgttcctggtgctgccccgtgacaaagacacccccctgagccacatcgagccacacctcacagccagcaccatccacctctggaccaccagcctgaggagagccaggatggatgtgttcctgcccaggtttaggatccaaaatcaattcaacttaaaaagcattttaaattcttggggagtcaccgatctttttgatccactcaaagctaacttgaaaggaatttcaggccaagatggcttttatgtttctgaagcaatccacaaggccaagattgaagttttggaggaaggcaccaaggcatctggagccacagctctgttgttattgaaaaggtctcggattcctatttttaaagcagatcggccattcatctatttcctgagagaacctaacacagggtttgtcttcagtattgggagagtttcaaatcccctagactaa

SEQ ID NO: 70 - protein, 362 aa, Homo sapiens
MPPFLITLFLFHSCCLRANGHLREGMTLLKTEFALHLYQSVAACRNETNFVISPAGVSLPLEILQFGAEGSTGQQLADALGYTVHDKRVKDFLHAVYATLPTSSQGTEMELACSLFVQVGTPLSPCFVEHVSWWANSSLEPADLSEPNSTAIQTSEGASRETADTQILPFTCAYGLVLQVPMMHQTTEVNYGQFQDTAGHQVGVLELPYLGSAVSLFLVLPRDKDTPLSHIEPHLTASTIHLWTTSLRRARMDVFLPRFRIQNQFNLKSILNSWGVTDLFDPLKANLKGISGQDGFYVSEAIHKAKIEVLEEGTKASGATALLLLKRSRIPIFKADRPFIYFLREPNTGFVFSIGRVSNPLD

SEQ ID NO: 71 - DNA, 1631 bp, Homo sapiens
  misc_feature (1)...(1631): n = A,T,C or G
catgaatgctggagacccacaagaacagagtcgagcaaggaaacgtgcagcagtgatacaaaagtctggctttgctaaagtcacacatccagtaagtggccgaagcagatcttcagacccacagtttggctgccaaaggaccacagaaccctcccagcctccatgccgcctttcctgatcaccctcttcctctttcactcttgctgcctccgagcaaatggccacctccgtgaaggaatgacattgctgaagactgagtttgcacttcacctctaccagagtgtggccgcgtgtagaaatgagacgaactttgtcatctctcctgctggtgtgtccctccccctggagatcctgcagtttggagcagaagggagcactggtcagcagctggcagatgccctggggtacactgtccatgacaaaagggtgaaagatttcttgcatgctgtttatgccacactacccacctccagccaaggcaccgagatggagctggcctgcagcctttttgtgcaagtgggaacgccactgtccccctgctttgtggagcacgtctcctggtgggctaacagcagcctggaaccagccgacctcagtgagcccaatagcaccgccatccagactagcgaaggggcctccagagagactgcaggtgggggccccagtgagggccctggtggctggccgtgggagcaagtcagtgcagcatttgctcagcttgtgcttgtgagcaccatgtccttccaaggcacttggcgaaagagattctcctccacagacacacagatcctgcctttcacctgtgcctatggcctcgtccttcaggtccccatgatgcaccaaacgaccgaggtcaactacggtcagttccaggacactgcaggccatcaggtgggggtgctggagcttccttacctgggaagtgcagtgagtctgttcctggtgctgccccgtgacaaagacacccccctgagccacatcgagccacacctcacagccagcaccatccacctctggaccaccagcctgaggagagccaggatggatgtgttcctgcccaggtttaggatccaaaatcaattcaacttaaaaagcattttaaattcttggggagtcaccgatctttttgatccactcaaagctaacttgaaaggaatttcaggccaagatggcttttatgtttctgaagcaatccacaaggccaagattgaagttttggaggaaggcaccaaggcatctggagccacagctctgttgttattgaaaaggtctcggattcctatttttaaagcagatcggccattcatctatttcctgagagaacctaacacagggtttgtcttcagtattgggagagtttcaaatcccctagactaaatgcatgttctccactttcatcaatgcttttcttcataaagttataatttcattttgctatacccttgaaatttaaaaaaatgtctgataaagtgtaaaaagctaagggtatgtgattttcaatattataaacctaaaaatacttcagtttttaaatgttataagtttattttgcctactcttaatccaaatctattttgaccttcttttctactgcttaccccccaaaccactaaaaggcacagcagtgatna

SEQ ID NO: 72 - DNA, 3324 bp, Homo sapiens
  CDS (1)...(3324)
atgtggcctcgcctggccttttgttgctggggtctggcgctcgtttcgggctgggcgacctttcagcagatgtccccgtcgcgcaatttcagcttccgcctcttccccgagaccgcgcccggggcccccgggagtatccccgcgccgcccgctcctggcgacgaagcggcggggagcagagtggagcggctgggccaggcgttccggcgacgcgtgcggctgctgcgggagctcagcgagcgcctggagcttgtcttcctggtggatgattcgtccagcgtgggcgaagtcaacttccgcagcgagctcatgttcgtccgcaagctgctgtccgacttccccgtggtgcccacggccacgcgcgtggccatcgtgaccttctcgtccaagaactacgtggtgccgcgcgtcgattacatctccacccgccgcgcgcgccagcacaagtgcgcgctgctcctccaagagatccctgccatctcctaccgaggtggcggcacctacaccaagggcgccttccagcaagccgcgcaaattcttcttcatgctagagaaaactcaacaaaagttgtatttctcatcactgatggatattccaatgggggagaccctagaccaattgcagcgtcactgcgagattcaggagtggagatcttcacttttggcatatggcaagggaacattcgagagctgaatgacatggcttccaccccaaaggaggagcactgttacctgctacacagttttgaagaatttgaggctttagctcgccgggcattgcatgaagatctaccttctgggagttttattcaagatgatatggtccactgctcatatctttgtgatgaaggcaaggactgctgtgaccgaatgggaagctgcaaatgtgggacacacacaggccattttgagtgcatctgtgaaaaggggtattacgggaaaggtctgcagtatgaatgcacagcttgcccatcggggacatacaaacctgaaggctcaccaggaggaatcagcagttgcattccatgtcctgatgaaaatcacacctctccacctggaagcacatcccctgaagactgtgtctgcagagagggatacagggcatctggccagacctgtgaacttgtccactgccctgccctgaagcctcccgaaaatggttactttatccaaaacacttgcaacaaccacttcaatgcagcctgtggggtccgatgtcaccctggatttgatcttgtgggaagcagcatcatcttatgtctacccaatggtttgtggtccggttcagagagctactgcagagtaagaacatgtcctcatctccgccagccgaaacatggccacatcagctgttctacaagggaaatgttatataagacaacatgtttggttgcctgtgatgaagggtacagactagaaggcagtgataagcttacttgtcaaggaaacagccagtgggatgggccagaaccccggtgtgtggagcgccactgttccacctttcagatgcccaaagatgtcatcatatccccccacaactgtggcaagcagccagccaaatttgggacgatctgctatgtaagttgccgccaagggttcattttatctggagtcaaagaaatgctgagatgtaccacttctggaaaatggaatgtcggagttcaggcagctgtgtgtaaagacgtggaggctcctcaaatcaactgtcctaaggacatagaggctaagactctggaacagcaagattctgccaatgttacctggcagattccaacagctaaagacaactctggtgaaaaggtgtcagtccacgttcatccagctttcaccccaccttaccttttcccaattggagatgttgctatcgtatacacggcaactgacctatccggcaaccaggccagctgcattttccatatcaaggttattgatgcagaaccacctgtcatagactggtgcagatctccacctcccgtccaggtctcggagaaggtacatgccgcaagctgggatgagcctcagttctcagacaactcaggggctgaattggtcattaccagaagtcatacacaaggagaccttttccctcaaggggagactatagtacagtatacagccactgacccctcaggcaataacaggacatgtgatatccatattgtcataaaaggttctccctgtgaaattccattcacacctgtaaatggggattttatatgcactccagataatactggagtcaactgtacattaacttgcttggagggctatgatttcacagaagggtctactgacaagtattattgtgcttatgaagatggcgtctggaaaccaacatataccactgaatggccagactgtgccaaaaaacgttttgcaaaccacgggttcaagtcctttgagatgttctacaaagcagctcgttgtgatgacacagatctgatgaagaagttttctgaagcatttgagacgaccctgggaaaaatggtcccatcattttgtagtgatgcagaggacattgactgcagactggaggagaacctgaccaaaaaatattgcctagaatataattatgactatgaaaatggctttgcaattggaccaggtggctggggtgcagctaataggctggattactcttacgatgacttcctggacactgtgcaagaaacagccacaagcatcggcaatgccaagtcctcacggattaaaagaagtgccccattatctgactataaaattaagttaatttttaacatcacagctagtgtgccattacccgatgaaagaaatgatacccttgaatgggaaaatcagcaacgactccttcagacattggaaactatcacaaataaactgaaaaggactctcaacaaagaccccatgtattcctttcagcttgcatcagaaatacttatagccgacagcaattcattagaaacaaaaaaggcttcccccttctgcagaccaggctcagtgctgagagggcgtatgtgtgtcaattgccctttgggaacctattataatctggaacatttcacctgtgaaagctgccggatcggatcctatcaagatgaagaagggcaacttgagtgcaagctttgcccctctgggatgtacacggaatatatccattcaagaaacatctctgattgtaaaggtagaggcttactggacatttcaactagaagcagcccaatttttgtttcccttttgggggaaagaaagatttattttcttcacccaacactcggctcttgtctgaggcccctgtggcaaaagatagatttgcaagagaaaagcatacacatttattcaatataa

SEQ ID NO: 73 - protein, 1107 aa, Homo sapiens
MWPRLAFCCWGLALVSGWATFQQMSPSRNFSFRLFPETAPGAPGSIPAPPAPGDEAAGSRVERLGQAFRRRVRLLRELSERLELVFLVDDSSSVGEVNFRSELMFVRKLLSDFPVVPTATRVAIVTFSSKNYVVPRVDYISTRRARQHKCALLLQEIPAISYRGGGTYTKGAFQQAAQILLHARENSTKVVFLITDGYSNGGDPRPIAASLRDSGVEIFTFGIWQGNIRELNDMASTPKEEHCYLLHSFEEFEALARRALHEDLPSGSFIQDDMVHCSYLCDEGKDCCDRMGSCKCGTHTGHFECICEKGYYGKGLQYECTACPSGTYKPEGSPGGISSCIPCPDENHTSPPGSTSPEDCVCREGYRASGQTCELVHCPALKPPENGYFIQNTCNNHFNAACGVRCHPGFDLVGSSIILCLPNGLWSGSESYCRVRTCPHLRQPKHGHISCSTREMLYKTTCLVACDEGYRLEGSDKLTCQGNSQWDGPEPRCVERHCSTFQMPKDVIISPHNCGKQPAKFGTICYVSCRQGFILSGVKEMLRCTTSGKWNVGVQAAVCKDVEAPQINCPKDIEAKTLEQQDSANVTWQIPTAKDNSGEKVSVHVHPAFTPPYLFPIGDVAIVYTATDLSGNQASCIFHIKVIDAEPPVIDWCRSPPPVQVSEKVHAASWDEPQFSDNSGAELVITRSHTQGDLFPQGETIVQYTATDPSGNNRTCDIHIVIKGSPCEIPFTPVNGDFICTPDNTGVNCTLTCLEGYDFTEGSTDKYYCAYEDGVWKPTYTTEWPDCAKKRFANHGFKSFEMFYKAARCDDTDLMKKFSEAFETTLGKMVPSFCSDAEDIDCRLEENLTKKYCLEYNYDYENGFAIGPGGWGAANRLDYSYDDFLDTVQETATSIGNAKSSRIKRSAPLSDYKIKLIFNITASVPLPDERNDTLEWENQQRLLQTLETITNKLKRTLNKDPMYSFQLASEILIADSNSLETKKASPFCRPGSVLRGRMCVNCPLGTYYNLEHFTCESCRIGSYQDEEGQLECKLCPSGMYTEYIHSRNISDCKGRGLLDISTRSSPIFVSLLGERKIYFLHPTLGSCLRPLWQKIDLQEKSIHIYSI

SEQ ID NO: 74 - DNA, 10716 bp, Homo sapiens
  CDS (1)...(10716)
atgtggcctcgcctggccttttgttgctggggtctggcgctcgtttcgggctgggcgacctttcagcagatgtccccgtcgcgcaatttcagcttccgcctcttccccgagaccgcgcccggggcccccgggagtatccccgcgccgcccgctcctggcgacgaagcggcggggagcagagtggagcggctgggccaggcgttccggcgacgcgtgcggctgctgcgggagctcagcgagcgcctggagcttgtcttcctggtggatgattcgtccagcgtgggcgaagtcaacttccgcagcgagctcatgttcgtccgcaagctgctgtccgacttccccgtggtgcccacggccacgcgcgtggccatcgtgaccttctcgtccaagaactacgtggtgccgcgcgtcgattacatctccacccgccgcgcgcgccagcacaagtgcgcgctgctcctccaagagatccctgccatctcctaccgaggtggcggcacctacaccaagggcgccttccagcaagccgcgcaaattcttcttcatgctagagaaaactcaacaaaagttgtatttctcatcactgatggatattccaatgggggagaccctagaccaattgcagcgtcactgcgagattcaggagtggagatcttcacttttggcatatggcaagggaacattcgagagctgaatgacatggcttccaccccaaaggaggagcactgttacctgctacacagttttgaagaatttgaggctttagctcgccgggcattgcatgaagatctaccttctgggagttttattcaagatgatatggtccactgctcatatctttgtgatgaaggcaaggactgctgtgaccgaatgggaagctgcaaatgtgggacacacacaggccattttgagtgcatctgtgaaaaggggtattacgggaaaggtctgcagtatgaatgcacagcttgcccatcggggacatacaaacctgaaggctcaccaggaggaatcagcagttgcattccatgtcctgatgaaaatcacacctctccacctggaagcacatcccctgaagactgtgtctgcagagagggatacagggcatctggccagacctgtgaacttgtccactgccctgccctgaagcctcccgaaaatggttactttatccaaaacacttgcaacaaccacttcaatgcagcctgtggggtccgatgtcaccctggatttgatcttgtgggaagcagcatcatcttatgtctacccaatggtttgtggtccggttcagagagctactgcagagtaagaacatgtcctcatctccgccagccgaaacatggccacatcagctgttctacaagggaaatgttatataagacaacatgtttggttgcctgtgatgaagggtacagactagaaggcagtgataagcttacttgtcaaggaaacagccagtgggatgggccagaaccccggtgtgtggagcgccactgttccacctttcagatgcccaaagatgtcatcatatccccccacaactgtggcaagcagccagccaaatttgggacgatctgctatgtaagttgccgccaagggttcattttatctggagtcaaagaaatgctgagatgtaccacttctggaaaatggaatgtcggagttcaggcagctgtgtgtaaagacgtggaggctcctcaaatcaactgtcctaaggacatagaggctaagactctggaacagcaagattctgccaatgttacctggcagattccaacagctaaagacaactctggtgaaaaggtgtcagtccacgttcatccagctttcaccccaccttaccttttcccaattggagatgttgctatcgtatacacggcaactgacctatccggcaaccaggccagctgcattttccatatcaaggttattgatgcagaaccacctgtcatagactggtgcagatctccacctcccgtccaggtctcggagaaggtacatgccgcaagctgggatgagcctcagttctcagacaactcaggggctgaattggtcattaccagaagtcatacacaaggagaccttttccctcaaggggagactatagtacagtatacagccactgacccctcaggcaataacaggacatgtgatatccatattgtcataaaaggttctccctgtgaaattccattcacacctgtaaatggggattttatatgcactccagataatactggagtcaactgtacattaacttgcttggagggctatgatttcacagaagggtctactgacaagtattattgtgcttatgaagatggcgtctggaaaccaacatataccactgaatggccagactgtgccaaaaaacgttttgcaaaccacgggttcaagtcctttgagatgttctacaaagcagctcgttgtgatgacacagatctgatgaagaagttttctgaagcatttgagacgaccctgggaaaaatggtcccatcattttgtagtgatgcagaggacattgactgcagactggaggagaacctgaccaaaaaatattgcctagaatataattatgactatgaaaatggctttgcaattggaccaggtggctggggtgcagctaataggctggattactcttacgatgacttcctggacactgtgcaagaaacagccacaagcatcggcaatgccaagtcctcacggattaaaagaagtgccccattatctgactataaaattaagttaatttttaacatcacagctagtgtgccattacccgatgaaagaaatgatacccttgaatgggaaaatcagcaacgactccttcagacattggaaactatcacaaataaactgaaaaggactctcaacaaagaccccatgtattcctttcagcttgcatcagaaatacttatagccgacagcaattcattagaaacaaaaaaggcttcccccttctgcagaccaggctcagtgctgagagggcgtatgtgtgtcaattgccctttgggaacctattataatctggaacatttcacctgtgaaagctgccggatcggatcctatcaagatgaagaagggcaacttgagtgcaagctttgcccctctgggatgtacacggaatatatccattcaagaaacatctctgattgtaaagctcagtgtaaacaaggcacctactcatacagtggacttgagacttgtgaatcgtgtccactgggcacttatcagccaaaatttggttcccggagctgcctctcgtgtccagaaaacacctcaactgtgaaaagaggagccgtgaacatttctgcatgtggagttccttgtccagaaggaaaattctcgcgttctgggttaatgccctgtcacccatgtcctcgtgactattaccaacctaatgcagggaaggccttctgcctggcctgtcccttttatggaactaccccattcgctggttccagatccatcacagaatgttcaagttttagttcaactttctcagcggcagaggaaagtgtggtgccccctgcctctcttggacatattaaaaagaggcatgaaatcagcagtcaggttttccatgaatgcttctttaacccttgccacaatagtggaacctgccagcaacttgggcgtggttatgtttgtctctgtccacttggatatacaggcttaaagtgtgaaacagacatcgatgagtgcagcccactgccttgcctcaacaatggagtttgtaaagacctagttggggaattcatttgtgagtgcccatcaggttacacaggtcagcggtgtgaagaaaatataaatgagtgtagctccagtccttgtttaaataaaggaatctgtgttgatggtgtggctggctatcgttgcacatgtgtgaaaggatttgtaggcctgcattgtgaaacagaagtcaatgaatgccagtcaaacccatgcttaaataatgcagtctgtgaagaccaggttgggggattcttgtgcaaatgcccacctggatttttgggtacccgatgtggaaagaacgtcgatgagtgtctcagtcagccatgcaaaaatggagctacctgtaaagacggtgccaatagcttcagatgcctgtgtgcagctggcttcacaggatcacactgtgaattgaacatcaatgaatgtcagtctaatccatgtagaaatcaggccacctgtgtggatgaattaaattcatacagttgtaaatgtcagccaggattttcaggccaaaggtgtgaaacagaacagtctacaggctttaacctggattttgaagtttctggcatctatggatatgtcatgctagatggcatgctcccatctctccatgctctaacctgtaccttctggatgaaatcctctgacgacatgaactatggaacaccaatctcctatgcagttgataacggcagcgacaataccttgctcctgactgattataacggctgggttctttatgtgaatggcagggaaaagataacaaactgtccctcggtgaatgatggcagatggcatcatattgcaatcacttggacaagtgccaatggcatctggaaagtctatatcgatgggaaattatctgacggtggtgctggcctctctgttggtttgcccatacctggtggtggtgcgttagttctggggcaagagcaagacaaaaaaggagagggattcagcccagctgagtcttttgtgggctccataagccagctcaacctctgggactatgtcctgtctccacagcaggtgaagtcactggctacctcctgcccagaggaactcagtaaaggaaacgtgttagcatggcctgatttcttgtcaggaattgtggggaaagtgaagatcgattctaagagcatattttgttctgattgcccacgcttaggagggtcagtgcctcatctgagaactgcatctgaagatttaaagccaggttccaaagtcaatctgttctgtgatccaggcttccagctggtcgggaaccctgtgcagtactgtctgaatcaaggacagtggacacaaccacttcctcactgtgaacgcattagctgtggggtgccacctcctttggagaatggcttccattcagccgatgacttctatgctggcagcacagtaacctaccagtgcaacaatggctactatctattgggtgactcaaggatgttctgtacagataatgggagctggaacggcgtttcaccatcctgccttgatgtcgatgagtgtgcagttggatcagattgtagtgagcatgcttcttgcctgaacgtagatggatcctacatatgttcatgtgtcccaccgtacacaggagatgggaaaaactgtgcagaacctataaaatgtaaggctccaggaaatccggaaaatggccactcctcaggtgagatttatacagtaggtgccgcagtcacattttcgtgtcaggaaggataccagttgatgggagtaaccaaaatcacatgtttggagtctggagaatggaatcatctaataccatattgtaaagctgtttcatgtggtaaaccggctattccagaaaatggttgcattgaggagttagcatttacttttggcagcaaagtgacatataggtgtaataaaggatatactctggccggtgataaagaatcatcctgtcttgctaacagttcttggagtcattcccctcctgtgtgtgaaccagtgaagtgttctagtccggaaaatataaataatggaaaatatattttgagtgggcttacctacctttctactgcatcatattcatgcgatacaggatacagcttacagggcccttccattattgaatgcacggcttctggcatctgggacagagcgccacctgcctgtcacctcgtcttctgtggagaaccacctgccatcaaagatgctgtcattacggggaataacttcactttcaggaacaccgtcacttacacttgcaaagaaggctatactcttgctggtcttgacaccattgaatgcctggccgacggcaagtggagtagaagtgaccagcagtgcctggctgtctcctgtgatgagccacccattgtggaccacgcctctccagagactgcccatcggctctttggagacattgcattctactactgctctgatggttacagcctagcagacaattcccagcttctctgcaatgcccagggcaagtgggtacccccagaaggtcaagacatgccccgttgtatagctcatttctgtgaaaaacctccatcggtttcctatagcatcttggaatctgtgagcaaagcaaaatttgcagctggctcagttgtgagctttaaatgcatggaaggctttgtactgaacacctcagcaaagattgaatgtatgagaggtgggcagtggaacccttcccccatgtccatccagtgcatccctgtgcggtgtggagagccaccaagcatcatgaatggctatgcaagtggatcaaactacagttttggagccatggtggcttacagctgcaacaaggggttctacatcaaaggggaaaagaagagcacctgcgaagccacagggcagtggagtagtcctataccgacgtgccacccggtatcttgtggtgaaccacctaaggttgagaatggctttctggagcatacaactggcaggatctttgagagtgaagtgaggtatcagtgtaacccgggctataagtcagtcggaagtcctgtatttgtctgccaagccaatcgccactggcacagtgaatcccctctgatgtgtgttcctctcgactgtggaaaacctcccccgatccagaatggcttcatgaaaggagaaaactttgaagtagggtccaaggttcagtttttctgtaatgagggttatgagcttgttggtgacagttcttggacatgtcagaaatctggcaaatggaataagaagtcaaatccaaagtgcatgcctgccaagtgcccagagccgcccctcttggaaaaccagctagtattaaaggagttgaccaccgaggtaggagttgtgacattttcctgtaaagaagggcatgtcctgcaaggcccctctgtcctgaaatgcttgccatcccagcaatggaatgactctttccctgtttgtaagattgttctttgtaccccacctcccctaatttcctttggtgtccccattccttcttctgctcttcattttggaagtactgtcaagtattcttgtgtaggtgggtttttcctaagaggaaattctaccaccctctgccaacctgatggcacctggagctctccactgccagaatgtgttccagtagaatgtccccaacctgaggaaatccccaatggaatcattgatgtgcaaggccttgcctatctcagcacagctctctatacctgcaagccaggctttgaattggtgggaaatactaccaccctttgtggagaaaatggtcactggcttggaggaaaaccaacatgtaaagccattgagtgcctgaaacccaaggagattttgaatggcaaattctcttacacggacctacactatggacagaccgttacctactcttgcaaccgaggctttcggctcgaaggtcccagtgccttgacctgtttagagacaggtgattgggatgtagatgccccatcttgcaatgccatccactgtgattccccacaacccattgaaaatggttttgtagaaggtgcagattacagctatggtgccataatcatctacagttgcttccctgggtttcaggtggctggtcatgccatgcagacctgtgaagagtcaggatggtcaagttccatcccaacatgtatgccaatagactgtggcctccctcctcatatagattttggagactgtactaaactcaaagatgaccagggatattttgagcaagaagacgacatgatggaagttccatatgtgactcctcaccctccttatcatttgggagcagtggctaaaacctgggaaaatacaaaggagtctcctgctacacattcatcaaactttctgtatggtaccatggtttcatacacctgtaatccaggatatgaacttctggggaaccctgtgctgatctgccaggaagatggaacttggaatggcagtgcaccatcctgcatttcaattgaatgtgacttgcctactgctcctgaaaatggctttttgcgttttacagagactagcatgggaagtgctgtgcagtatagctgtaaacctggacacattctagcaggctctgacttaaggctttgtctagagaatagaaagtggagtggtgcctccccacgctgtgaagccatttcatgcaaaaagccaaatccagtcatgaatggatccatcaaaggaagcaactacacatacctgagcacgttgtactatgagtgtgaccccggatatgtgctgaatggcactgagaggagaacatgccaggatgacaaaaactgggatgaggatgagcccatttgcattcctgtggactgcagttcacccccagtctcagccaatggccaggtgagaggagacgagtacacattccaaaaagagattgaatacacttgcaatgaagggttcttgcttgagggagccaggagtcgggtttgtcttgccaatggaagttggagtggagccactcccgactgtgtgcctgtcagatgtgccaccccgccacaactggccaatggggtgacggaaggcctggactatggcttcatgaaggaagtaacattccactgtcatgagggctacatcttgcacggtgctccaaaactcacctgtcagtcagatggcaactgggatgcagagattcctctctgtaaaccagtcaactgtggacctcctgaagatcttgcccatggtttccctaatggtttttcctttattcatgggggccatatacagtatcagtgctttcctggttataagctccatggaaattcatcaagaaggtgcctctccaatggctcctggagtggcagctcaccttcctgcctgccttgcagatgttccacaccagtaattgaatatggaactgtcaatgggacagattttgactgtggaaaggcagcccggattcagtgcttcaaaggcttcaagctcctaggactttctgaaatcacctgtgaagccgatggccagtggagctctgggttcccccactgtgaacacacttcttgtggttctcttccaatgataccaaatgcgttcatcagtgagaccagctcttggaaggaaaatgtgataacttacagctgcaggtctggatatgtcatacaaggcagttcagatctgatttgtacagagaaaggggtatggagccagccttatccagtctgtgagcccttgtcctgtgggtccccaccgtctgtcgccaatgcagtggcaactggagaggcacacacctatgaaagtgaagtgaaactcagatgtctggaaggttatacgatggatacagatacagatacattcacctgtcagaaagatggtcgctggttccctgagagaatctcctgcagtcctaaaaaatgtcctctcccggaaaacataacacatatacttgttcatggggacgatttcagtgtgaataggcaagtttctgtgtcatgtgcagaagggtatacctttgagggagttaacatatcagtatgtcagcttgatggaacctgggagccaccattctccgatgaatcttgcagtccagtttcttgtgggaaacctgaaagtccagaacatggatttgtggttggcagtaaatacacctttgaaagcacaattatttatcagtgtgagcctggctatgaactagaggggaacagggaacgtgtctgccaggagaacagacagtggagtggaggggtggcaatatgcaaagagaccaggtgtgaaactccacttgaatttctcaatgggaaagctgacattgaaaacaggacgactggacccaacgtggtatattcctgcaacagaggctacagtcttgaagggccatctgaggcacactgcacagaaaatggaacctggagccacccagtccctctctgcaaaccaaatccatgccctgttccttttgtgattcccgagaatgctctgctgtctgaaaaggagttttatgttgatcagaatgtgtccatcaaatgtagggaaggttttctgctgcagggccacggcatcattacctgcaaccccgacgagacgtggacacagacaagcgccaaatgtgaaaaaatctcatgtggtccaccagctcacgtagaaaatgcaattgctcgaggcgtacattatcaatatggagacatgatcacctactcatgttacagtggatacatgttggagggtttcctgaggagtgtttgtttagaaaatggaacatggacatcacctcctatttgcagagctgtctgtcgatttccatgtcagaatgggggcatctgccaacgcccaaatgcttgttcctgtccagagggctggatggggcgcctctgtgaagaaccaatctgcattcttccctgtctgaacggaggtcgctgtgtggccccttaccagtgtgactgcccgcctggctggacggggtctcgctgtcatacagctgtttgccagtctccctgcttaaatggtggaaaatgtgtaagaccaaaccgatgtcactgtctttcttcttggacgggacataactgttccaggaaaaggaggactgggttttaa

SEQ ID NO: 75 - protein, 3571 aa, Homo sapiens
MWPRLAFCCWGLALVSGWATFQQMSPSRNFSFRLFPETAPGAPGSIPAPPAPGDEAAGSRVERLGQAFRRRVRLLRELSERLELVFLVDDSSSVGEVNFRSELMFVRKLLSDFPVVPTATRVAIVTFSSKNYVVPRVDYISTRRARQHKCALLLQEIPAISYRGGGTYTKGAFQQAAQILLHARENSTKVVFLITDGYSNGGDPRPIAASLRDSGVEIFTFGIWQGNIRELNDMASTPKEEHCYLLHSFEEFEALARRALHEDLPSGSFIQDDMVHCSYLCDEGKDCCDRMGSCKCGTHTGHFECICEKGYYGKGLQYECTACPSGTYKPEGSPGGISSCIPCPDENHTSPPGSTSPEDCVCREGYRASGQTCELVHCPALKPPENGYFIQNTCNNHFNAACGVRCHPGFDLVGSSIILCLPNGLWSGSESYCRVRTCPHLRQPKHGHISCSTREMLYKTTCLVACDEGYRLEGSDKLTCQGNSQWDGPEPRCVERHCSTFQMPKDVIISPHNCGKQPAKFGTICYVSCRQGFILSGVKEMLRCTTSGKWNVGVQAAVCKDVEAPQINCPKDIEAKTLEQQDSANVTWQIPTAKDNSGEKVSVHVHPAFTPPYLFPIGDVAIVYTATDLSGNQASCIFHIKVIDAEPPVIDWCRSPPPVQVSEKVHAASWDEPQFSDNSGAELVITRSHTQGDLFPQGETIVQYTATDPSGNNRTCDIHIVIKGSPCEIPFTPVNGDFICTPDNTGVNCTLTCLEGYDFTEGSTDKYYCAYEDGVWKPTYTTEWPDCAKKRFANHGFKSFEMFYKAARCDDTDLMKKFSEAFETTLGKMVPSFCSDAEDIDCRLEENLTKKYCLEYNYDYENGFAIGPGGWGAANRLDYSYDDFLDTVQETATSIGNAKSSRIKRSAPLSDYKIKLIFNITASVPLPDERNDTLEWENQQRLLQTLETITNKLKRTLNKDPMYSFQLASEILIADSNSLETKKASPFCRPGSVLRGRMCVNCPLGTYYNLEHFTCESCRIGSYQDEEGQLECKLCPSGMYTEYIHSRNISDCKAQCKQGTYSYSGLETCESCPLGTYQPKFGSRSCLSCPENTSTVKRGAVNISACGVPCPEGKFSRSGLMPCHPCPRDYYQPNAGKAFCLACPFYGTTPFAGSRSITECSSFSSTFSAAEESVVPPASLGHIKKRHEISSQVFHECFFNPCHNSGTCQQLGRGYVCLCPLGYTGLKCETDIDECSPLPCLNNGVCKDLVGEFICECPSGYTGQRCEENINECSSSPCLNKGICVDGVAGYRCTCVKGFVGLHCETEVNECQSNPCLNNAVCEDQVGGFLCKCPPGFLGTRCGKNVDECLSQPCKNGATCKDGANSFRCLCAAGFTGSHCELNINECQSNPCRNQATCVDELNSYSCKCQPGFSGQRCETEQSTGFNLDFEVSGIYGYVMLDGMLPSLHALTCTFWMKSSDDMNYGTPISYAVDNGSDNTLLLTDYNGWVLYVNGREKITNCPSVNDGRWHHIAITWTSANGIWKVYIDGKLSDGGAGLSVGLPIPGGGALVLGQEQDKKGEGFSPAESFVGSISQLNLWDYVLSPQQVKSLATSCPEELSKGNVLAWPDFLSGIVGKVKIDSKSIFCSDCPRLGGSVPHLRTASEDLKPGSKVNLFCDPGFQLVGNPVQYCLNQGQWTQPLPHCERISCGVPPPLENGFHSADDFYAGSTVTYQCNNGYYLLGDSRMFCTDNGSWNGVSPSCLDVDECAVGSDCSEHASCLNVDGSYICSCVPPYTGDGKNCAEPIKCKAPGNPENGHSSGEIYTVGAAVTFSCQEGYQLMGVTKITCLESGEWNHLIPYCKAVSCGKPAIPENGCIEELAFTFGSKVTYRCNKGYTLAGDKESSCLANSSWSHSPPVCEPVKCSSPENINNGKYILSGLTYLSTASYSCDTGYSLQGPSIIECTASGIWDRAPPACHLVFCGEPPAIKDAVITGNNFTFRNTVTYTCKEGYTLAGLDTIECLADGKWSRSDQQCLAVSCDEPPIVDHASPETAHRLFGDIAFYYCSDGYSLADNSQLLCNAQGKWVPPEGQDMPRCIAHFCEKPPSVSYSILESVSKAKFAAGSVVSFKCMEGFVLNTSAKIECMRGGQWNPSPMSIQCIPVRCGEPPSIMNGYASGSNYSFGAMVAYSCNKGFYIKGEKKSTCEATGQWSSPIPTCHPVSCGEPPKVENGFLEHTTGRIFESEVRYQCNPGYKSVGSPVFVCQANRHWHSESPLMCVPLDCGKPPPIQNGFMKGENFEVGSKVQFFCNEGYELVGDSSWTCQKSGKWNKKSNPKCMPAKCPEPPLLENQLVLKELTTEVGVVTFSCKEGHVLQGPSVLKCLPSQQWNDSFPVCKIVLCTPPPLISFGVPIPSSALHFGSTVKYSCVGGFFLRGNSTTLCQPDGTWSSPLPECVPVECPQPEEIPNGIIDVQGLAYLSTALYTCKPGFELVGNTTTLCGENGHWLGGKPTCKAIECLKPKEILNGKFSYTDLHYGQTVTYSCNRGFRLEGPSALTCLETGDWDVDAPSCNAIHCDSPQPIENGFVEGADYSYGAIIIYSCFPGFQVAGHAMQTCEESGWSSSIPTCMPIDCGLPPHIDFGDCTKLKDDQGYFEQEDDMMEVPYVTPHPPYHLGAVAKTWENTKESPATHSSNFLYGTMVSYTCNPGYELLGNPVLICQEDGTWNGSAPSCISIECDLPTAPENGFLRFTETSMGSAVQYSCKPGHILAGSDLRLCLENRKWSGASPRCEAISCKKPNPVMNGSIKGSNYTYLSTLYYECDPGYVLNGTERRTCQDDKNWDEDEPICIPVDCSSPPVSANGQVRGDEYTFQKEIEYTCNEGFLLEGARSRVCLANGSWSGATPDCVPVRCATPPQLANGVTEGLDYGFMKEVTFHCHEGYILHGAPKLTCQSDGNWDAEIPLCKPVNCGPPEDLAHGFPNGFSFIHGGHIQYQCFPGYKLHGNSSRRCLSNGSWSGSSPSCLPCRCSTPVIEYGTVNGTDFDCGKAARIQCFKGFKLLGLSEITCEADGQWSSGFPHCEHTSCGSLPMIPNAFISETSSWKENVITYSCRSGYVIQGSSDLICTEKGVWSQPYPVCEPLSCGSPPSVANAVATGEAHTYESEVKLRCLEGYTMDTDTDTFTCQKDGRWFPERISCSPKKCPLPENITHILVHGDDFSVNRQVSVSCAEGYTFEGVNISVCQLDGTWEPPFSDESCSPVSCGKPESPEHGFVVGSKYTFESTIIYQCEPGYELEGNRERVCQENRQWSGGVAICKETRCETPLEFLNGKADIENRTTGPNVVYSCNRGYSLEGPSEAHCTENGTWSHPVPLCKPNPCPVPFVIPENALLSEKEFYVDQNVSIKCREGFLLQGHGIITCNPDETWTQTSAKCEKISCGPPAHVENAIARGVHYQYGDMITYSCYSGYMLEGFLRSVCLENGTWTSPPICRAVCRFPCQNGGICQRPNACSCPEGWMGRLCEEPICILPCLNGGRCVAPYQCDCPPGWTGSRCHTAVCQSPCLNGGKCVRPNRCHCLSSWTGHNCSRKRRTGF

SEQ ID NO: 76 - DNA, 5529 bp, Homo sapiens
  CDS (1)...(5529)
atgtggcctcgcctggccttttgttgctggggtctggcgctcgtttcgggctgggcgacctttcagcagatgtccccgtcgcgcaatttcagcttccgcctcttccccgagaccgcgcccggggcccccgggagtatccccgcgccgcccgctcctggcgacgaagcggcggggagcagagtggagcggctgggccaggcgttccggcgacgcgtgcggctgctgcgggagctcagcgagcgcctggagcttgtcttcctggtggatgattcgtccagcgtgggcgaagtcaacttccgcagcgagctcatgttcgtccgcaagctgctgtccgacttccccgtggtgcccacggccacgcgcgtggccatcgtgaccttctcgtccaagaactacgtggtgccgcgcgtcgattacatctccacccgccgcgcgcgccagcacaagtgcgcgctgctcctccaagagatccctgccatctcctaccgaggtggcggcacctacaccaagggcgccttccagcaagccgcgcaaattcttcttcatgctagagaaaactcaacaaaagttgtatttctcatcactgatggatattccaatgggggagaccctagaccaattgcagcgtcactgcgagattcaggagtggagatcttcacttttggcatatggcaagggaacattcgagagctgaatgacatggcttccaccccaaaggaggagcactgttacctgctacacagttttgaagaatttgaggctttagctcgccgggcattgcatgaagatctaccttctgggagttttattcaagatgatatggtccactgctcatatctttgtgatgaaggcaaggactgctgtgaccgaatgggaagctgcaaatgtgggacacacacaggccattttgagtgcatctgtgaaaaggggtattacgggaaaggtctgcagtatgaatgcacagcttgcccatcggggacatacaaacctgaaggctcaccaggaggaatcagcagttgcattccatgtcctgatgaaaatcacacctctccacctggaagcacatcccctgaagactgtgtctgcagagagggatacagggcatctggccagacctgtgaacttgtccactgccctgccctgaagcctcccgaaaatggttactttatccaaaacacttgcaacaaccacttcaatgcagcctgtggggtccgatgtcaccctggatttgatcttgtgggaagcagcatcatcttatgtctacccaatggtttgtggtccggttcagagagctactgcagagtaagaacatgtcctcatctccgccagccgaaacatggccacatcagctgttctacaagggaaatgttatataagacaacatgtttggttgcctgtgatgaagggtacagactagaaggcagtgataagcttacttgtcaaggaaacagccagtgggatgggccagaaccccggtgtgtggagcgccactgttccacctttcagatgcccaaagatgtcatcatatccccccacaactgtggcaagcagccagccaaatttgggacgatctgctatgtaagttgccgccaagggttcattttatctggagtcaaagaaatgctgagatgtaccacttctggaaaatggaatgtcggagttcaggcagctgtgtgtaaagacgtggaggctcctcaaatcaactgtcctaaggacatagaggctaagactctggaacagcaagattctgccaatgttacctggcagattccaacagctaaagacaactctggtgaaaaggtgtcagtccacgttcatccagctttcaccccaccttaccttttcccaattggagatgttgctatcgtatacacggcaactgacctatccggcaaccaggccagctgcattttccatatcaaggttattgatgcagaaccacctgtcatagactggtgcagatctccacctcccgtccaggtctcggagaaggtacatgccgcaagctgggatgagcctcagttctcagacaactcaggggctgaattggtcattaccagaagtcatacacaaggagaccttttccctcaaggggagactatagtacagtatacagccactgacccctcaggcaataacaggacatgtgatatccatattgtcataaaaggttctccctgtgaaattccattcacacctgtaaatggggattttatatgcactccagataatactggagtcaactgtacattaacttgcttggagggctatgatttcacagaagggtctactgacaagtattattgtgcttatgaagatggcgtctggaaaccaacatataccactgaatggccagactgtgccaaaaaacgttttgcaaaccacgggttcaagtcctttgagatgttctacaaagcagctcgttgtgatgacacagatctgatgaagaagttttctgaagcatttgagacgaccctgggaaaaatggtcccatcattttgtagtgatgcagaggacattgactgcagactggaggagaacctgaccaaaaaatattgcctagaatataattatgactatgaaaatggctttgcaattggaccaggtggctggggtgcagctaataggctggattactcttacgatgacttcctggacactgtgcaagaaacagccacaagcatcggcaatgccaagtcctcacggattaaaagaagtgccccattatctgactataaaattaagttaatttttaacatcacagctagtgtgccattacccgatgaaagaaatgatacccttgaatgggaaaatcagcaacgactccttcagacattggaaactatcacaaataaactgaaaaggactctcaacaaagaccccatgtattcctttcagcttgcatcagaaatacttatagccgacagcaattcattagaaacaaaaaaggcttcccccttctgcagaccaggctcagtgctgagagggcgtatgtgtgtcaattgccctttgggaacctattataatctggaacatttcacctgtgaaagctgccggatcggatcctatcaagatgaagaagggcaacttgagtgcaagctttgcccctctgggatgtacacggaatatatccattcaagaaacatctctgattgtaaagctcagtgtaaacaaggcacctactcatacagtggacttgagacttgtgaatcgtgtccactgggcacttatcagccaaaatttggttcccggagctgcctctcgtgtccagaaaacacctcaactgtgaaaagaggagccgtgaacatttctgcatgtggagttccttgtccagaaggaaaattctcgcgttctgggttaatgccctgtcacccatgtcctcgtgactattaccaacctaatgcagggaaggccttctgcctggcctgtcccttttatggaactaccccattcgctggttccagatccatcacagaatgttcaagttttagttcaactttctcagcggcagaggaaagtgtggtgccccctgcctctcttggacatattaaaaagaggcatgaaatcagcagtcaggttttccatgaatgcttctttaacccttgccacaatagtggaacctgccagcaacttgggcgtggttatgtttgtctctgtccacttggatatacaggcttaaagtgtgaaacagacatcgatgagtgcagcccactgccttgcctcaacaatggagtttgtaaagacctagttggggaattcatttgtgagtgcccatcaggttacacaggtcagcggtgtgaagaaaatataaatgagtgtagctccagtccttgtttaaataaaggaatctgtgttgatggtgtggctggctatcgttgcacatgtgtgaaaggatttgtaggcctgcattgtgaaacagaagtcaatgaatgccagtcaaacccatgcttaaataatgcagtctgtgaagaccaggttgggggattcttgtgcaaatgcccacctggatttttgggtacccgatgtggaaagaacgtcgatgagtgtctcagtcagccatgcaaaaatggagctacctgtaaagacggtgccaatagcttcagatgcctgtgtgcagctggcttcacaggatcacactgtgaattgaacatcaatgaatgtcagtctaatccatgtagaaatcaggccacctgtgtggatgaattaaattcatacagttgtaaatgtcagccaggattttcaggccaaaggtgtgaaacagaacagtctacaggctttaacctggattttgaagtttctggcatctatggatatgtcatgctagatggcatgctcccatctctccatgctctaacctgtaccttctggatgaaatcctctgacgacatgaactatggaacaccaatctcctatgcagttgataacggcagcgacaataccttgctcctgactgattataacggctgggttctttatgtgaatggcagggaaaagataacaaactgtccctcggtgaatgatggcagatggcatcatattgcaatcacttggacaagtgccaatggcatctggaaagtctatatcgatgggaaattatctgacggtggtgctggcctctctgttggtttgcccatacctggtggtggtgcgttagttctggggcaagagcaagacaaaaaaggagagggattcagcccagctgagtcttttgtgggctccataagccagctcaacctctgggactatgtcctgtctccacagcaggtgaagtcactggctacctcctgcccagaggaactcagtaaaggaaacgtgttagcatggcctgatttcttgtcaggaattgtggggaaagtgaagatcgattctaagagcatattttgttctgattgcccacgcttaggagggtcagtgcctcatctgagaactgcatctgaagatttaaagccaggttccaaagtcaatctgttctgtgatccaggcttccagctggtcgggaaccctgtgcagtactgtctgaatcaaggacagtggacacaaccacttcctcactgtgaacgcattagctgtggggtgccacctcctttggagaatggcttccattcagccgatgacttctatgctggcagcacagtaacctaccagtgcaacaatggctactatctattgggtgactcaaggatgttctgtacagataatgggagctggaacggcgtttcaccatcctgccttgatgtcgatgagtgtgcagttggatcagattgtagtgagcatgcttcttgcctgaacgtagatggatcctacatatgttcatgtgtcccaccgtacacaggagatgggaaaaactgtgcagaacctataaaatgtaaggctccaggaaatccggaaaatggccactcctcaggtgagatttatacagtaggtgccgcagtcacattttcgtgtcaggaaggataccagttgatgggagtaaccaaaatcacatgtttggagtctggagaatggaatcatctaataccatattgttaa

SEQ ID NO: 77 - protein, 1842 aa, Homo sapiens
MWPRLAFCCWGLALVSGWATFQQMSPSRNFSFRLFPETAPGAPGSIPAPPAPGDEAAGSRVERLGQAFRRRVRLLRELSERLELVFLVDDSSSVGEVNFRSELMFVRKLLSDFPVVPTATRVAIVTFSSKNYVVPRVDYISTRRARQHKCALLLQEIPAISYRGGGTYTKGAFQQAAQILLHARENSTKVVFLITDGYSNGGDPRPIAASLRDSGVEIFTFGIWQGNIRELNDMASTPKEEHCYLLHSFEEFEALARRALHEDLPSGSFIQDDMVHCSYLCDEGKDCCDRMGSCKCGTHTGHFECICEKGYYGKGLQYECTACPSGTYKPEGSPGGISSCIPCPDENHTSPPGSTSPEDCVCREGYRASGQTCELVHCPALKPPENGYFIQNTCNNHFNAACGVRCHPGFDLVGSSIILCLPNGLWSGSESYCRVRTCPHLRQPKHGHISCSTREMLYKTTCLVACDEGYRLEGSDKLTCQGNSQWDGPEPRCVERHCSTFQMPKDVIISPHNCGKQPAKFGTICYVSCRQGFILSGVKEMLRCTTSGKWNVGVQAAVCKDVEAPQINCPKDIEAKTLEQQDSANVTWQIPTAKDNSGEKVSVHVHPAFTPPYLFPIGDVAIVYTATDLSGNQASCIFHIKVIDAEPPVIDWCRSPPPVQVSEKVHAASWDEPQFSDNSGAELVITRSHTQGDLFPQGETIVQYTATDPSGNNRTCDIHIVIKGSPCEIPFTPVNGDFICTPDNTGVNCTLTCLEGYDFTEGSTDKYYCAYEDGVWKPTYTTEWPDCAKKRFANHGFKSFEMFYKAARCDDTDLMKKFSEAFETTLGKMVPSFCSDAEDIDCRLEENLTKKYCLEYNYDYENGFAIGPGGWGAANRLDYSYDDFLDTVQETATSIGNAKSSRIKRSAPLSDYKIKLIFNITASVPLPDERNDTLEWENQQRLLQTLETITNKLKRTLNKDPMYSFQLASEILIADSNSLETKKASPFCRPGSVLRGRMCVNCPLGTYYNLEHFTCESCRIGSYQDEEGQLECKLCPSGMYTEYIHSRNISDCKAQCKQGTYSYSGLETCESCPLGTYQPKFGSRSCLSCPENTSTVKRGAVNISACGVPCPEGKFSRSGLMPCHPCPRDYYQPNAGKAFCLACPFYGTTPFAGSRSITECSSFSSTFSAAEESVVPPASLGHIKKRHEISSQVFHECFFNPCHNSGTCQQLGRGYVCLCPLGYTGLKCETDIDECSPLPCLNNGVCKDLVGEFICECPSGYTGQRCEENINECSSSPCLNKGICVDGVAGYRCTCVKGFVGLHCETEVNECQSNPCLNNAVCEDQVGGFLCKCPPGFLGTRCGKNVDECLSQPCKNGATCKDGANSFRCLCAAGFTGSHCELNINECQSNPCRNQATCVDELNSYSCKCQPGFSGQRCETEQSTGFNLDFEVSGIYGYVMLDGMLPSLHALTCTFWMKSSDDMNYGTPISYAVDNGSDNTLLLTDYNGWVLYVNGREKITNCPSVNDGRWHHIAITWTSANGIWKVYIDGKLSDGGAGLSVGLPIPGGGALVLGQEQDKKGEGFSPAESFVGSISQLNLWDYVLSPQQVKSLATSCPEELSKGNVLAWPDFLSGIVGKVKIDSKSIFCSDCPRLGGSVPHLRTASEDLKPGSKVNLFCDPGFQLVGNPVQYCLNQGQWTQPLPHCERISCGVPPPLENGFHSADDFYAGSTVTYQCNNGYYLLGDSRMFCTDNGSWNGVSPSCLDVDECAVGSDCSEHASCLNVDGSYICSCVPPYTGDGKNCAEPIKCKAPGNPENGHSSGEIYTVGAAVTFSCQEGYQLMGVTKITCLESGEWNHLIPYC

SEQ ID NO: 78 - DNA, 11434 bp, Homo sapiens
ggcacgaggcgcgccgtttccctccggagttcccgagctgctgaggagtctggattgtgtctgtccccagtgtcagatgaaagggcgctgaggctcttggccgctgccccgcgcccagctccgcgcacgcccctctgcgagtccggccgcccagcgcctcttcccgcccgagccgccgcctgcgctccggggcagccgctctgtctccagcgcgatgtggcctcgcctggccttttgttgctggggtctggcgctcgtttcgggctgggcgacctttcagcagatgtccccgtcgcgcaatttcagcttccgcctcttccccgagaccgcgcccggggcccccgggagtatccccgcgccgcccgctcctggcgacgaagcggcggggagcagagtggagcggctgggccaggcgttccggcgacgcgtgcggctgctgcgggagctcagcgagcgcctggagcttgtcttcctggtggatgattcgtccagcgtgggcgaagtcaacttccgcagcgagctcatgttcgtccgcaagctgctgtccgacttccccgtggtgcccacggccacgcgcgtggccatcgtgaccttctcgtccaagaactacgtggtgccgcgcgtcgattacatctccacccgccgcgcgcgccagcacaagtgcgcgctgctcctccaagagatccctgccatctcctaccgaggtggcggcacctacaccaagggcgccttccagcaagccgcgcaaattcttcttcatgctagagaaaactcaacaaaagttgtatttctcatcactgatggatattccaatgggggagaccctagaccaattgcagcgtcactgcgagattcaggagtggagatcttcacttttggcatatggcaagggaacattcgagagctgaatgacatggcttccaccccaaaggaggagcactgttacctgctacacagttttgaagaatttgaggctttagctcgccgggcattgcatgaagatctaccttctgggagttttattcaagatgatatggtccactgctcatatctttgtgatgaaggcaaggactgctgtgaccgaatgggaagctgcaaatgtgggacacacacaggccattttgagtgcatctgtgaaaaggggtattacgggaaaggtctgcagtatgaatgcacagcttgcccatcggggacatacaaacctgaaggctcaccaggaggaatcagcagttgcattccatgtcctgatgaaaatcacacctctccacctggaagcacatcccctgaagactgtgtctgcagagagggatacagggcatctggccagacctgtgaacttgtccactgccctgccctgaagcctcccgaaaatggttactttatccaaaacacttgcaacaaccacttcaatgcagcctgtggggtccgatgtcaccctggatttgatcttgtgggaagcagcatcatcttatgtctacccaatggtttgtggtccggttcagagagctactgcagagtaagaacatgtcctcatctccgccagccgaaacatggccacatcagctgttctacaagggaaatgttatataagacaacatgtttggttgcctgtgatgaagggtacagactagaaggcagtgataagcttacttgtcaaggaaacagccagtgggatgggccagaaccccggtgtgtggagcgccactgttccacctttcagatgcccaaagatgtcatcatatccccccacaactgtggcaagcagccagccaaatttgggacgatctgctatgtaagttgccgccaagggttcattttatctggagtcaaagaaatgctgagatgtaccacttctggaaaatggaatgtcggagttcaggcagctgtgtgtaaagacgtggaggctcctcaaatcaactgtcctaaggacatagaggctaagactctggaacagcaagattctgccaatgttacctggcagattccaacagctaaagacaactctggtgaaaaggtgtcagtccacgttcatccagctttcaccccaccttaccttttcccaattggagatgttgctatcgtatacacggcaactgacctatccggcaaccaggccagctgcattttccatatcaaggttattgatgcagaaccacctgtcatagactggtgcagatctccacctcccgtccaggtctcggagaaggtacatgccgcaagctgggatgagcctcagttctcagacaactcaggggctgaattggtcattaccagaagtcatacacaaggagaccttttccctcaaggggagactatagtacagtatacagccactgacccctcaggcaataacaggacatgtgatatccatattgtcataaaaggttctccctgtgaaattccattcacacctgtaaatggggattttatatgcactccagataatactggagtcaactgtacattaacttgcttggagggctatgatttcacagaagggtctactgacaagtattattgtgcttatgaagatggcgtctggaaaccaacatataccactgaatggccagactgtgccaaaaaacgttttgcaaaccacgggttcaagtcctttgagatgttctacaaagcagctcgttgtgatgacacagatctgatgaagaagttttctgaagcatttgagacgaccctgggaaaaatggtcccatcattttgtagtgatgcagaggacattgactgcagactggaggagaacctgaccaaaaaatattgcctagaatataattatgactatgaaaatggctttgcaattggaccaggtggctggggtgcagctaataggctggattactcttacgatgacttcctggacactgtgcaagaaacagccacaagcatcggcaatgccaagtcctcacggattaaaagaagtgccccattatctgactataaaattaagttaatttttaacatcacagctagtgtgccattacccgatgaaagaaatgatacccttgaatgggaaaatcagcaacgactccttcagacattggaaactatcacaaataaactgaaaaggactctcaacaaagaccccatgtattcctttcagcttgcatcagaaatacttatagccgacagcaattcattagaaacaaaaaaggcttcccccttctgcagaccaggctcagtgctgagagggcgtatgtgtgtcaattgccctttgggaacctattataatctggaacatttcacctgtgaaagctgccggatcggatcctatcaagatgaagaagggcaacttgagtgcaagctttgcccctctgggatgtacacggaatatatccattcaagaaacatctctgattgtaaagctcagtgtaaacaaggcacctactcatacagtggacttgagacttgtgaatcgtgtccactgggcacttatcagccaaaatttggttcccggagctgcctctcgtgtccagaaaacacctcaactgtgaaaagaggagccgtgaacatttctgcatgtggagttccttgtccagaaggaaaattctcgcgttctgggttaatgccctgtcacccatgtcctcgtgactattaccaacctaatgcagggaaggccttctgcctggcctgtcccttttatggaactaccccattcgctggttccagatccatcacagaatgttcaagttttagttcaactttctcagcggcagaggaaagtgtggtgccccctgcctctcttggacatattaaaaagaggcatgaaatcagcagtcaggttttccatgaatgcttctttaacccttgccacaatagtggaacctgccagcaacttgggcgtggttatgtttgtctctgtccacttggatatacaggcttaaagtgtgaaacagacatcgatgagtgcagcccactgccttgcctcaacaatggagtttgtaaagacctagttggggaattcatttgtgagtgcccatcaggttacacaggtcagcggtgtgaagaaaatataaatgagtgtagctccagtccttgtttaaataaaggaatctgtgttgatggtgtggctggctatcgttgcacatgtgtgaaaggatttgtaggcctgcattgtgaaacagaagtcaatgaatgccagtcaaacccatgcttaaataatgcagtctgtgaagaccaggttgggggattcttgtgcaaatgcccacctggatttttgggtacccgatgtggaaagaacgtcgatgagtgtctcagtcagccatgcaaaaatggagctacctgtaaagacggtgccaatagcttcagatgcctgtgtgcagctggcttcacaggatcacactgtgaattgaacatcaatgaatgtcagtctaatccatgtagaaatcaggccacctgtgtggatgaattaaattcatacagttgtaaatgtcagccaggattttcaggccaaaggtgtgaaacagaacagtctacaggctttaacctggattttgaagtttctggcatctatggatatgtcatgctagatggcatgctcccatctctccatgctctaacctgtaccttctggatgaaatcctctgacgacatgaactatggaacaccaatctcctatgcagttgataacggcagcgacaataccttgctcctgactgattataacggctgggttctttatgtgaatggcagggaaaagataacaaactgtccctcggtgaatgatggcagatggcatcatattgcaatcacttggacaagtgccaatggcatctggaaagtctatatcgatgggaaattatctgacggtggtgctggcctctctgttggtttgcccatacctggtggtggtgcgttagttctggggcaagagcaagacaaaaaaggagagggattcagcccagctgagtcttttgtgggctccataagccagctcaacctctgggactatgtcctgtctccacagcaggtgaagtcactggctacctcctgcccagaggaactcagtaaaggaaacgtgttagcatggcctgatttcttgtcaggaattgtggggaaagtgaagatcgattctaagagcatattttgttctgattgcccacgcttaggagggtcagtgcctcatctgagaactgcatctgaagatttaaagccaggttccaaagtcaatctgttctgtgatccaggcttccagctggtcgggaaccctgtgcagtactgtctgaatcaaggacagtggacacaaccacttcctcactgtgaacgcattagctgtggggtgccacctcctttggagaatggcttccattcagccgatgacttctatgctggcagcacagtaacctaccagtgcaacaatggctactatctattgggtgactcaaggatgttctgtacagataatgggagctggaacggcgtttcaccatcctgccttgatgtcgatgagtgtgcagttggatcagattgtagtgagcatgcttcttgcctgaacgtagatggatcctacatatgttcatgtgtcccaccgtacacaggagatgggaaaaactgtgcagaacctataaaatgtaaggctccaggaaatccggaaaatggccactcctcaggtgagatttatacagtaggtgccgcagtcacattttcgtgtcaggaaggataccagttgatgggagtaaccaaaatcacatgtttggagtctggagaatggaatcatctaataccatattgtaaagctgtttcatgtggtaaaccggctattccagaaaatggttgcattgaggagttagcatttacttttggcagcaaagtgacatataggtgtaataaaggatatactctggccggtgataaagaatcatcctgtcttgctaacagttcttggagtcattcccctcctgtgtgtgaaccagtgaagtgttctagtccggaaaatataaataatggaaaatatattttgagtgggcttacctacctttctactgcatcatattcatgcgatacaggatacagcttacagggcccttccattattgaatgcacggcttctggcatctgggacagagcgccacctgcctgtcacctcgtcttctgtggagaaccacctgccatcaaagatgctgtcattacggggaataacttcactttcaggaacaccgtcacttacacttgcaaagaaggctatactcttgctggtcttgacaccattgaatgcctggccgacggcaagtggagtagaagtgaccagcagtgcctggctgtctcctgtgatgagccacccattgtggaccacgcctctccagagactgcccatcggctctttggagacattgcattctactactgctctgatggttacagcctagcagacaattcccagcttctctgcaatgcccagggcaagtgggtacccccagaaggtcaagacatgccccgttgtatagctcatttctgtgaaaaacctccatcggtttcctatagcatcttggaatctgtgagcaaagcaaaatttgcagctggctcagttgtgagctttaaatgcatggaaggctttgtactgaacacctcagcaaagattgaatgtatgagaggtgggcagtggaacccttcccccatgtccatccagtgcatccctgtgcggtgtggagagccaccaagcatcatgaatggctatgcaagtggatcaaactacagttttggagccatggtggcttacagctgcaacaaggggttctacatcaaaggggaaaagaagagcacctgcgaagccacagggcagtggagtagtcctataccgacgtgccacccggtatcttgtggtgaaccacctaaggttgagaatggctttctggagcatacaactggcaggatctttgagagtgaagtgaggtatcagtgtaacccgggctataagtcagtcggaagtcctgtatttgtctgccaagccaatcgccactggcacagtgaatcccctctgatgtgtgttcctctcgactgtggaaaacctcccccgatccagaatggcttcatgaaaggagaaaactttgaagtagggtccaaggttcagtttttctgtaatgagggttatgagcttgttggtgacagttcttggacatgtcagaaatctggcaaatggaataagaagtcaaatccaaagtgcatgcctgccaagtgcccagagccgcccctcttggaaaaccagctagtattaaaggagttgaccaccgaggtaggagttgtgacattttcctgtaaagaagggcatgtcctgcaaggcccctctgtcctgaaatgcttgccatcccagcaatggaatgactctttccctgtttgtaagattgttctttgtaccccacctcccctaatttcctttggtgtccccattccttcttctgctcttcattttggaagtactgtcaagtattcttgtgtaggtgggtttttcctaagaggaaattctaccaccctctgccaacctgatggcacctggagctctccactgccagaatgtgttccagtagaatgtccccaacctgaggaaatccccaatggaatcattgatgtgcaaggccttgcctatctcagcacagctctctatacctgcaagccaggctttgaattggtgggaaatactaccaccctttgtggagaaaatggtcactggcttggaggaaaaccaacatgtaaagccattgagtgcctgaaacccaaggagattttgaatggcaaattctcttacacggacctacactatggacagaccgttacctactcttgcaaccgaggctttcggctcgaaggtcccagtgccttgacctgtttagagacaggtgattgggatgtagatgccccatcttgcaatgccatccactgtgattccccacaacccattgaaaatggttttgtagaaggtgcagattacagctatggtgccataatcatctacagttgcttccctgggtttcaggtggctggtcatgccatgcagacctgtgaagagtcaggatggtcaagttccatcccaacatgtatgccaatagactgtggcctccctcctcatatagattttggagactgtactaaactcaaagatgaccagggatattttgagcaagaagacgacatgatggaagttccatatgtgactcctcaccctccttatcatttgggagcagtggctaaaacctgggaaaatacaaaggagtctcctgctacacattcatcaaactttctgtatggtaccatggtttcatacacctgtaatccaggatatgaacttctggggaaccctgtgctgatctgccaggaagatggaacttggaatggcagtgcaccatcctgcatttcaattgaatgtgacttgcctactgctcctgaaaatggctttttgcgttttacagagactagcatgggaagtgctgtgcagtatagctgtaaacctggacacattctagcaggctctgacttaaggctttgtctagagaatagaaagtggagtggtgcctccccacgctgtgaagccatttcatgcaaaaagccaaatccagtcatgaatggatccatcaaaggaagcaactacacatacctgagcacgttgtactatgagtgtgaccccggatatgtgctgaatggcactgagaggagaacatgccaggatgacaaaaactgggatgaggatgagcccatttgcattcctgtggactgcagttcacccccagtctcagccaatggccaggtgagaggagacgagtacacattccaaaaagagattgaatacacttgcaatgaagggttcttgcttgagggagccaggagtcgggtttgtcttgccaatggaagttggagtggagccactcccgactgtgtgcctgtcagatgtgccaccccgccacaactggccaatggggtgacggaaggcctggactatggcttcatgaaggaagtaacattccactgtcatgagggctacatcttgcacggtgctccaaaactcacctgtcagtcagatggcaactgggatgcagagattcctctctgtaaaccagtcaactgtggacctcctgaagatcttgcccatggtttccctaatggtttttcctttattcatgggggccatatacagtatcagtgctttcctggttataagctccatggaaattcatcaagaaggtgcctctccaatggctcctggagtggcagctcaccttcctgcctgccttgcagatgttccacaccagtaattgaatatggaactgtcaatgggacagattttgactgtggaaaggcagcccggattcagtgcttcaaaggcttcaagctcctaggactttctgaaatcacctgtgaagccgatggccagtggagctctgggttcccccactgtgaacacacttcttgtggttctcttccaatgataccaaatgcgttcatcagtgagaccagctcttggaaggaaaatgtgataacttacagctgcaggtctggatatgtcatacaaggcagttcagatctgatttgtacagagaaaggggtatggagccagccttatccagtctgtgagcccttgtcctgtgggtccccaccgtctgtcgccaatgcagtggcaactggagaggcacacacctatgaaagtgaagtgaaactcagatgtctggaaggttatacgatggatacagatacagatacattcacctgtcagaaagatggtcgctggttccctgagagaatctcctgcagtcctaaaaaatgtcctctcccggaaaacataacacatatacttgttcatggggacgatttcagtgtgaataggcaagtttctgtgtcatgtgcagaagggtatacctttgagggagttaacatatcagtatgtcagcttgatggaacctgggagccaccattctccgatgaatcttgcagtccagtttcttgtgggaaacctgaaagtccagaacatggatttgtggttggcagtaaatacacctttgaaagcacaattatttatcagtgtgagcctggctatgaactagaggggaacagggaacgtgtctgccaggagaacagacagtggagtggaggggtggcaatatgcaaagagaccaggtgtgaaactccacttgaatttctcaatgggaaagctgacattgaaaacaggacgactggacccaacgtggtatattcctgcaacagaggctacagtcttgaagggccatctgaggcacactgcacagaaaatggaacctggagccacccagtccctctctgcaaaccaaatccatgccctgttccttttgtgattcccgagaatgctctgctgtctgaaaaggagttttatgttgatcagaatgtgtccatcaaatgtagggaaggttttctgctgcagggccacggcatcattacctgcaaccccgacgagacgtggacacagacaagcgccaaatgtgaaaaaatctcatgtggtccaccagctcacgtagaaaatgcaattgctcgaggcgtacattatcaatatggagacatgatcacctactcatgttacagtggatacatgttggagggtttcctgaggagtgtttgtttagaaaatggaacatggacatcacctcctatttgcagagctgtctgtcgatttccatgtcagaatgggggcatctgccaacgcccaaatgcttgttcctgtccagagggctggatggggcgcctctgtgaagaaccaatctgcattcttccctgtctgaacggaggtcgctgtgtggccccttaccagtgtgactgcccgcctggctggacggggtctcgctgtcatacagctgtttgccagtctccctgcttaaatggtggaaaatgtgtaagaccaaaccgatgtcactgtctttcttcttggacgggacataactgttccaggaaaaggaggactgggttttaaccactgcacgaccatctggctctcccaaaagcaggatcatctctcctcggtagtgcctgggcatcctggaacttatgcaaagaaagtccaacatggtgctgggtcttgtttagtaaacttgttacttggggttactttttttattttgtgatatattttgttattccttgtgacatactttcttacatgtttccatttttaaatatgcctgtattttctatataaaaattatattaaatagatgctgctctaccctcacaaaaagaacatattctgctgtctattgggaaagttcctggtacacatttttattcagttacttaaaatgatttttccattaaagtatattttgctactaaataatattttgctggatagtaccattttatgaggtggccaagggattcatagagaggactcatgatctttcatctgtgccactggcaccacataggagaccccttacaataaaggagacccctttgttctggttccatcttctat

SEQ ID NO: 79 - DNA, 1302 bp, Homo sapiens
  CDS (1)...(1302)
atggctgaggggcgagaactgatcctggacctggagaagaatgagcaactttttgctccttcctacacagaaacccattatacttcaagtggtaaccctcaaaccaccacacggaaattggaggatcactgcttttaccacggcacggtgagggagacagaactgtccagcgtcacgctcagcacttgccgaggaattagaggactgattacggtgagcagcaacctcagctacgtcatcgagcccctccctgacagcaagggccaacaccttatttacagatctgaacatctcaagccgccccccctgaccgggcgggaagtcctgacgcccttcccaggattgggcactgcggcagccccggcacagggcggggcccacctgaagcagtgtgacctgctgaagctgtcccggcggcagaagcagctctgccggagggagcccggcctggctgagaccctgagggatgctgcgcacctcggcctgcttgagtgccagtttcagttccggcatgagcgctggaactgtagcctggagggcaggatgggcctgctcaagagaggcttcaaagagacagctttcctgtacgcggtgtcctctgccgccctcacccacaccctggcccgggcctgcagcgctgggcgcatggagcgctgcacctgtgatgactctccggggctggagagccggcaggcctggcagtggggcgtgtgcggtgacaacctcaagtacagcaccaagtttctgagcaacttcctggggtccaagagaggaaacaaggacctgcgggcacgggcagacgcccacaatacccacgtgggcatcaaggctgtgaagagtggcctcaggaccacgtgtaagtgccatggcgtatcaggctcctgtgccgtgcgcacctgctggaagcagctctccccgttccgtgagacgggccaggtgctgaaactgcgctatgactcggctgtcaaggtgtccagtgccaccaatgaggccttgggccgcctagagctgtgggcccctgccaggcagggcagcctcaccaaaggcctggccccaaggtctggggacctggtgtacatggaggactcacccagcttctgccggcccagcaagtactcacctggcacagcaggtagggtgtgctcccgggaggccagctgcagcagcctgtgctgcgggcggggctatgacacccagagccgcctggtggccttctcctgccactgccaggtgcagtggtgctgctacgtggagtgccagcaatgtgtgcaggaggagcttgtgtacacctgcaagcactag

SEQ ID NO: 80 - protein, 433 aa, Homo sapiens
MAEGRELILDLEKNEQLFAPSYTETHYTSSGNPQTTTRKLEDHCFYHGTVRETELSSVTLSTCRGIRGLITVSSNLSYVIEPLPDSKGQHLIYRSEHLKPPPLTGREVLTPFPGLGTAAAPAQGGAHLKQCDLLKLSRRQKQLCRREPGLAETLRDAAHLGLLECQFQFRHERWNCSLEGRMGLLKRGFKETAFLYAVSSAALTHTLARACSAGRMERCTCDDSPGLESRQAWQWGVCGDNLKYSTKFLSNFLGSKRGNKDLRARADAHNTHVGIKAVKSGLRTTCKCHGVSGSCAVRTCWKQLSPFRETGQVLKLRYDSAVKVSSATNEALGRLELWAPARQGSLTKGLAPRSGDLVYMEDSPSFCRPSKYSPGTAGRVCSREASCSSLCCGRGYDTQSRLVAFSCHCQVQWCCYVECQQCVQEELVYTCKH

SEQ ID NO: 81 - DNA, 1092 bp, Homo sapiens
  CDS (1)...(1092)
atgaaaggacgggcagtttcttttgatcctctggcatgccaaggcctgaatgccagtcctgggagccttaccagccctctaagaagaatcagaagcctgaccgggcgggaagtcctgacgcccttcccaggattgggcactgcggcagccccggcacagggcggggcccacctgaagcagtgtgacctgctgaagctgtcccggcggcagaagcagctctgccggagggagcccggcctggctgagaccctgagggatgctgcgcacctcggcctgcttgagtgccagtttcagttccggcatgagcgctggaactgtagcctggagggcaggatgggcctgctcaagagaggcttcaaagagacagctttcctgtacgcggtgtcctctgccgccctcacccacaccctggcccgggcctgcagcgctgggcgcatggagcgctgcacctgtgatgactctccggggctggagagccggcaggcctggcagtggggcgtgtgcggtgacaacctcaagtacagcaccaagtttctgagcaacttcctggggtccaagagaggaaacaaggacctgcgggcacgggcagacgcccacaatacccacgtgggcatcaaggctgtgaagagtggcctcaggaccacgtgtaagtgccatggcgtatcaggctcctgtgccgtgcgcacctgctggaagcagctctccccgttccgtgagacgggccaggtgctgaaactgcgctatgactcggctgtcaaggtgtccagtgccaccaatgaggccttgggccgcctagagctgtgggcccctgccaggcagggcagcctcaccaaaggcctggccccaaggtctggggacctggtgtacatggaggactcacccagcttctgccggcccagcaagtactcacctggcacagcaggtagggtgtgctcccgggaggccagctgcagcagcctgtgctgcgggcggggctatgacacccagagccgcctggtggccttctcctgccactgccaggtgcagtggtgctgctacgtggagtgccagcaatgtgtgcaggaggagcttgtgtacacctgcaagcactag

SEQ ID NO: 82 - protein, 363 aa, Homo sapiens
MKGRAVSFDPLACQGLNASPGSLTSPLRRIRSLTGREVLTPFPGLGTAAAPAQGGAHLKQCDLLKLSRRQKQLCRREPGLAETLRDAAHLGLLECQFQFRHERWNCSLEGRMGLLKRGFKETAFLYAVSSAALTHTLARACSAGRMERCTCDDSPGLESRQAWQWGVCGDNLKYSTKFLSNFLGSKRGNKDLRARADAHNTHVGIKAVKSGLRTTCKCHGVSGSCAVRTCWKQLSPFRETGQVLKLRYDSAVKVSSATNEALGRLELWAPARQGSLTKGLAPRSGDLVYMEDSPSFCRPSKYSPGTAGRVCSREASCSSLCCGRGYDTQSRLVAFSCHCQVQWCCYVECQQCVQEELVYTCKH

SEQ ID NO: 83 - DNA, 1726 bp, Homo sapiens
ttcagcctggttaagtccaagctgaattcgcggccgcttgatggacaagaggaagtgaggaaggcagccccaagctgcagcatgaacttatcatacctcagtggaagacttcagaaagccccgtgagagaaaagcatccactcaaagctgagctcagggtaatggctgaggggcgagaactgatcctggacctggagaagaatgagcaactttttgctccttcctacacagaaacccattatacttcaagtggtaaccctcaaaccaccacacggaaattggaggatcactgcttttaccacggcacggtgagggagacagaactgtccagcgtcacgctcagcacttgccgaggaattagaggactgattacggtgagcagcaacctcagctacgtcatcgagcccctccctgacagcaagggccaacaccttatttacagatctgaacatctcaagccgccccccctgaccgggcgggaagtcctgacgcccttcccaggattgggcactgcggcagccccggcacagggcggggcccacctgaagcagtgtgacctgctgaagctgtcccggcggcagaagcagctctgccggagggagcccggcctggctgagaccctgagggatgctgcgcacctcggcctgcttgagtgccagtttcagttccggcatgagcgctggaactgtagcctggagggcaggatgggcctgctcaagagaggcttcaaagagacagctttcctgtacgcggtgtcctctgccgccctcacccacaccctggcccgggcctgcagcgctgggcgcatggagcgctgcacctgtgatgactctccggggctggagagccggcaggcctggcagtggggcgtgtgcggtgacaacctcaagtacagcaccaagtttctgagcaacttcctggggtccaagagaggaaacaaggacctgcgggcacgggcagacgcccacaatacccacgtgggcatcaaggctgtgaagagtggcctcaggaccacgtgtaagtgccatggcgtatcaggctcctgtgccgtgcgcacctgctggaagcagctctccccgttccgtgagacgggccaggtgctgaaactgcgctatgactcggctgtcaaggtgtccagtgccaccaatgaggccttgggccgcctagagctgtgggcccctgccaggcagggcagcctcaccaaaggcctggccccaaggtctggggacctggtgtacatggaggactcacccagcttctgccggcccagcaagtactcacctggcacagcaggtagggtgtgctcccgggaggccagctgcagcagcctgtgctgcgggcggggctatgacacccagagccgcctggtggccttctcctgccactgccaggtgcagtggtgctgctacgtggagtgccagcaatgtgtgcaggaggagcttgtgtacacctgcaagcactaggcctactgcccagcaagccagtctggcactgycaggacctcctgtggcacccttcaagctgcccagccggccctctgggcagactgtcatcacatgcatgcataaaccggcatgtgtgccaatgcacacgagtgtgccactcaccaccattccttggccagccttttgcctccctcgatactcaacaaagagaagcaaagcctcctcccttaacccaagcatccccaaccttgttgaggacttggagaggagggcagagtgag

SEQ ID NO: 84 - DNA, 255 bp, Homo sapiens
  CDS (1)...(255)
atgttcagggccctatcctgtgccatccccaaagggcttctctccttactaagcagggtagaagaggctacgtgttgcatagagaaattgtctttgaggaccagcactcaccatcaagttcatgttgagggccaaacctgtccacctaagtgcctttgcaccacacacttctaccactgggaatctgtacaaaaagaggagaatgtgagttattctaacactttgaggataggaagaggcatcaataaaacctga

SEQ ID NO: 85 - protein, 84 aa, Homo sapiens
MFRALSCAIPKGLLSLLSRVEEATCCIEKLSLRTSTHHQVHVEGQTCPPKCLCTTHFYHWESVQKEENVSYSNTLRIGRGINKT

SEQ ID NO: 86 - DNA, 476 bp, Homo sapiens
cattgtgcccggctgataattcttacagtttcttctactccctgcccactcctggaggatctagctccattctagatgttcagggccctatcctgtgccatccccaaagggcttctctccttactaagcagggtagaagaggctacgtgttgcatagagaaattgtctttgaggaccagcactcaccatcaagttcatgttgagggccaaacctgtccacctaagtgcctttgcaccacacacttctaccactgggaatctgtacaaaaagaggagaatgtgagttattctaacactttgaggataggaagaggcatcaataaaacctgaattccatcacaatgttttggcaataaggccagactccctcccaagacattccctttaagccttgatgttttatctgtaaagtgagaagagtgatatcttcttcacaaggttgttgggaaaataaaatgagatacctgcccgggcgg

SEQ ID NO: 87 - DNA, 1098 bp, Homo sapiens
  CDS (1)...(1098)
atgctggatgggtccccgctggcgcgctggctggccgcggccttcgggctgacgctgctgctcgccgcgctgcgcccttcggccgcctacttcgggctgacgggcagcgagcccctgaccatcctcccgctgaccctggagccagaggcggccgcccaggcgcactacaaggcctgcgaccggctgaagctggagcggaagcagcggcgcatgtgccgccgggacccgggcgtggcagagacgctggtggaggccgtgagcatgagtgcgctcgagtgccagttccagttccgctttgagcgctggaactgcacgctggagggccgctaccgggccagcctgctcaagcgaggcttcaaggagactgccttcctctatgccatctcctcggctggcctgacgcacgcactggccaaggcgtgcagcgcgggccgcatggagcgctgtacctgcgatgaggcacccgacctggagaaccgtgaggcctggcagtgggggggctgcggagacaaccttaagtacagcagcaagttcgtcaaggaattcctgggcagacggtcaagcaaggatctgcgagcccgtgtggacttccacaacaacctcgtgggtgtgaaggtgatcaaggttggggtggagaccacctgcaagtgccacggcgtgtcaggctcatgcacggtgcggacctgctggcggcagttggcgcctttccatgaggtgggcaagcatctgaagcacaagtatgagacggcactcaaggtgggcagcaccaccaatgaagctgccggcgaggcaggtgccatctccccaccacggggccgtgcctcgggggcaggtggcagcgacccgctgccccgcactccagagctggtgcacctggatgactcgcctagcttctgcctggctggccgcttctccccgggcaccgctggccgtaggtgccaccgtcagaagacctgcgagagcatctgctgtggccgcggccataacacacagagccgggtggtgacaaggccctgccagtgccaggtgcgttggtgctgctatgtggagtgcaggcagtgcacgcagcgtgaggaggtctacacctgcaagggctga

SEQ ID NO: 88 - protein, 365 aa, Homo sapiens
MLDGSPLARWLAAAFGLTLLLAALRPSAAYFGLTGSEPLTILPLTLEPEAAAQAHYKACDRLKLERKQRRMCRRDPGVAETLVEAVSMSALECQFQFRFERWNCTLEGRYRASLLKRGFKETAFLYAISSAGLTHALAKACSAGRMERCTCDEAPDLENREAWQWGGCGDNLKYSSKFVKEFLGRRSSKDLRARVDFHNNLVGVKVIKVGVETTCKCHGVSGSCTVRTCWRQLAPFHEVGKHLKHKYETALKVGSTTNEAAGEAGAISPPRGRASGAGGSDPLPRTPELVHLDDSPSFCLAGRFSPGTAGRRCHRQKTCESICCGRGHNTQSRVVTRPCQCQVRWCCYVECRQCTQREEVYTCKG

SEQ ID NO: 89 - DNA, 1533 bp, Homo sapiens
ggagctcgatggtcggccgccgaggcgcggcaagatgctggatgggtccccgctggcgcgctggctggccgcggccttcgggctgacgctgctgctcgccgcgctgcgcccttcggccgcctacttcgggctgacgggcagcgagcccctgaccatcctcccgctgaccctggagccagaggcggccgcccaggcgcactacaaggcctgcgaccggctgaagctggagcggaagcagcggcgcatgtgccgccgggacccgggcgtggcagagacgctggtggaggccgtgagcatgagtgcgctcgagtgccagttccagttccgctttgagcgctggaactgcacgctggagggccgctaccgggccagcctgctcaagcgaggcttcaaggagactgccttcctctatgccatctcctcggctggcctgacgcacgcactggccaaggcgtgcagcgcgggccgcatggagcgctgtacctgcgatgaggcacccgacctggagaaccgtgaggcctggcagtgggggggctgcggagacaaccttaagtacagcagcaagttcgtcaaggaattcctgggcagacggtcaagcaaggatctgcgagcccgtgtggacttccacaacaacctcgtgggtgtgaaggtgatcaaggttggggtggagaccacctgcaagtgccacggcgtgtcaggctcatgcacggtgcggacctgctggcggcagttggcgcctttccatgaggtgggcaagcatctgaagcacaagtatgagacggcactcaaggtgggcagcaccaccaatgaagctgccggcgaggcaggtgccatctccccaccacggggccgtgcctcgggggcaggtggcagcgacccgctgccccgcactccagagctggtgcacctggatgactcgcctagcttctgcctggctggccgcttctccccgggcaccgctggccgtaggtgccaccgtcagaagacctgcgagagcatctgctgtggccgcggccataacacacagagccgggtggtgacaaggccctgccagtgccaggtgcgttggtgctgctatgtggagtgcaggcagtgcacgcagcgtgaggaggtctacacctgcaagggctgagttcccaggccctgccagccctgctgcacagggtgcaggcattgcacacggtgtgaagggtctacacctgcacaggctgagttcctgggctcgaccagcccagctgcgtggggtacaggcattgcacacagtgtgaatgggtctacacctgcatgggctgagtccctgggctcagacctagcagcgtggggtgagtccctgggctcagtcctagctgcatggggtgcaggcattgcacagagcatgaatgggcctacacctgccaaggctgaatccctgggcccagtcagccctgctgcacatggcacaggcatttgcacacggtgtgaggagtgtacacctgcaagggctgaggccctgggcccagtcagccctgctgctagagtgcaggcattgcacat

SEQ ID NO: 90 - DNA, 2988 bp, Homo sapiens
  CDS (1)...(2988)
atgtcgttccttgaagaggcgagggcagcggggcgcgcggtggtcctggcgttggtgctgctgctgctccccgccgtgcccgtgggcgccagcgttccgccgcggcccctgctcccgctgcagcccggcatgccccacgtgtgtgctgagcaggagctgaccctggtgggccgccgccagccgtgcgtgcaggccttaagccacacggtgccggtgtggaaggccggctgtgggtggcaggcgtggtgcgtgggtcatgagcggagaaccgtctactacatgggctacaggcaggtgtataccacggaggcccggaccgtgctcaggtgctgccgagggtggatgcagcagcccgacgaggagggctgcctctcggctgaatgcagcgccggcctctgttttcacggtggccgttgtgtgccaggctcagcccagccgtgtcactgtccccccggcttccagggaccccgctgtcagtatgatgtggacgaatgccaaacccacaacggtggytgccagcaccggtgcgtgaacaccccaggctcctacctctgtgagtgcaagcccggcttccggctccacactgacagcaggacctgcctggccattaactcctgcgccctgggcaatggcggctgccagcaccactgtgtccagctcacaatcactcggcatcgctgccagtgccggcccgggttccagctccaggaggacggcaggcattgtgtccgtagaagcccgtgtgccaacaggaacggcagctgcatgcacaggtgccaggtggtccggggcctcgcccgctgtgagtgccacgtgggctatcagctagcagcggacggcaaggcctgtgaagatgtggacgaatgtgccgcagggctggcccagtgtgcccatggctgcctcaacacccaggggtccttcaagtgcgtgtgtcacgygggctatgagctgggcgccgatggccggcagtgctaccggattgagatggaaatcgtgaacagctgtgaggccaacaacggcggctgctcccatggctgcagccacaccagtgctgggcccctgtgcacmtgtccccgcggctacgagctggacacagatcagaggacctgcatcgatgtcgacgactgtgcagacagcccgtgctgccagcaggtgtgcacctgcccggccggctggaggggcaccttctgcgagcatgcctgcccggccggcttctttggattggactgtcgcagtgcctgcaactgcaccgccggagctgcctgtgatgccgtgaatggctcctgcctctgccccgctggccgccggggcccccgctgtgccgagacctgcccagcccacacctacgggcacaattgcagccaggcctgtgcctgctttaacggggcctcctgtgaccctgtccacgggcagtgccactgtgcccctggctggatggggccctcctgcctgcaggcctgccctgccggcctgtacggagacaactgtcggcattcctgcctctgccagaacggagggacctgtgaccctgtctcaggccactgtgcgtgcccagagggctgggccggcctggcctgtgagaaggagtgcctcccccgggacgtcagagctggctgccggcacagcggcggttgcctcaacgggggcctgtgtgacccgcacacgggccgctgcctctgcccagccggctggactggggacaagtgtcagagcccctgcctgcggggctggtttggagaggcctgtgcccagcgctgcagctgcccgcctggcgctgcctgccaccacgtcactggggcctgccgctgtccccctggcttcactggctccggctgcgagcaggcctgcccacccggcagctttggggaggactgtgcgcagatgtgccagtgtcccggtgagaacccggcctgccaccctgccaccgggacctgctcatgtgctgctggctaccacggccccagctgccagcaacgatgtccgcccgggcggtatgggccaggctgtgaacagctgtgtgggtgtctcaacgggggctcctgtgatgcggccacgggggcctgccgctgccccactgggttcctcgggacggactgcaacctcacctgtccgcagggccgcttcggccccaactgcacccacgtgtgtgggtgtgggcagggggcggcctgcgaccctgtgaccggcacctgcctctgccccccggggagagccggcgtccgctgtgagcgaggctgcccccagaaccggtttggcgtgggctgcgagcacacctgctcctgcagaaatgggggcctgtgccacgccagcaacggcagctgctcctgtggcctgggctggacggggcggcactgcgagctggcctgtccccctgggcgctacggagccgcctgccatctggagtgctcctgccacaacaacagcacgtgtgagcctgccacgggcacctgccgctgcggccccggcttctatggccaggcctgcgagcacccctgtccccctggcttccacggggctggctgccaggggttgtgctggtgtcaacatggagccccctgcgascccatcagtggccgatgcctctgccctgccggcttccacggccacttctgtgagagggggtgtgagccaggttcattyggagagggctgccaccagcgctgtgactgtgacgggggggcaccctgtgaccctgtcaccggtctctgcctttgcccaccagggcgctcaggagccacctgtaacctggattgcagaaggggccagtttgggcccagctgcaccctgcactgtgactgcgggggtggggctgactgcgaccctgtcagtgggcagtgtcactgtgtggatggctacatggggcccacgtgccgggaaggtgggcccctccggctccccgagaacccgtccttagcccagggctcagcgggcacactgcccgcctccagcagacccacatcccggagcggtggaccagcgaggcactag

SEQ ID NO: 91 - protein, 995 aa, Homo sapiens
  VARIANT (1)...(995): Xaa = Any Amino Acid
MSFLEEARAAGRAVVLALVLLLLPAVPVGASVPPRPLLPLQPGMPHVCAEQELTLVGRRQPCVQALSHTVPVWKAGCGWQAWCVGHERRTVYYMGYRQVYTTEARTVLRCCRGWMQQPDEEGCLSAECSAGLCFHGGRCVPGSAQPCHCPPGFQGPRCQYDVDECQTHNGXCQHRCVNTPGSYLCECKPGFRLHTDSRTCLAINSCALGNGGCQHHCVQLTITRHRCQCRPGFQLQEDGRHCVRRSPCANRNGSCMHRCQVVRGLARCECHVGYQLAADGKACEDVDECAAGLAQCAHGCLNTQGSFKCVCHXGYELGADGRQCYRIEMEIVNSCEANNGGCSHGCSHTSAGPLCXCPRGYELDTDQRTCIDVDDCADSPCCQQVCTCPAGWRGTFCEHACPAGFFGLDCRSACNCTAGAACDAVNGSCLCPAGRRGPRCAETCPAHTYGHNCSQACACFNGASCDPVHGQCHCAPGWMGPSCLQACPAGLYGDNCRHSCLCQNGGTCDPVSGHCACPEGWAGLACEKECLPRDVRAGCRHSGGCLNGGLCDPHTGRCLCPAGWTGDKCQSPCLRGWFGEACAQRCSCPPGAACHHVTGACRCPPGFTGSGCEQACPPGSFGEDCAQMCQCPGENPACHPATGTCSCAAGYHGPSCQQRCPPGRYGPGCEQLCGCLNGGSCDAATGACRCPTGFLGTDCNLTCPQGRFGPNCTHVCGCGQGAACDPVTGTCLCPPGRAGVRCERGCPQNRFGVGCEHTCSCRNGGLCHASNGSCSCGLGWTGRHCELACPPGRYGAACHLECSCHNNSTCEPATGTCRCGPGFYGQACEHPCPPGFHGAGCQGLCWCQHGAPCXPISGRCLCPAGFHGHFCERGCEPGSFGEGCHQRCDCDGGAPCDPVTGLCLCPPGRSGATCNLDCRRGQFGPSCTLHCDCGGGADCDPVSGQCHCVDGYMGPTCREGGPLRLPENPSLAQGSAGTLPASSRPTSRSGGPARH

SEQ ID NO: 92 - DNA, 3393 bp, Homo sapiens
  CDS (1)...(3393)
atgtcgttccttgaagaggcgagggcaacggggcgcgcggtggtcctggcgttggtgctgctgctgctcccccccgtgcccatcctaatackactcactatagggctcgagcggccgccygggcaggtgggggcgtggcggctttccaggctctgggtccggggcactgtgctcaacgcgccggggcgagttcctgcagggtggacccggcgatcaggtctccgcggtgccactttgggcgcgggcgggaagccgggacgctccgcacctgcagcgaccttgggctccgcggaccgggcgcgggcacctgtggctgcgtcctatggcgcacgtggaggcggaggctccggggagccgccggggccgcctgtgagccggagagcggaggaggcaccggcgcgcacgatgtcgttccttgaagaggcgagggcagcggggcgcgcggtggtcctggcgttggtgctgctgctgctccccgccgtgcccgtgggcgccagcgttccgccgcggcccctgctcccgctgcagcccggcatgccccacgtgtgtgctgagcaggagctgaccctggtgggccgccgccagccgtgcgtgcaggccttaagccacacggtgccggtgtggaaggccggctgtgggtggcaggcgtggtgcgtgggtcatgagcggagaaccgtctactacatgggctacaggcaggtgtataccacggaggcccggaccgtgctcaggtgctgccgagggtggatgcagcagcccgacgaggagggctgcctctcggctgaatgcagcgccggcctctgttttcacggtggccgttgtgtgccaggctcagcccagccgtgtcactgtccccccggcttccagggaccccgctgtcagtatgatgtggacgaatgccaaacccacaacggtggytgccagcaccggtgcgtgaacaccccaggctcctacctctgtgagtgcaagcccggcttccggctccacactgacagcaggacctgcctggccattaactcctgcgccctgggcaatggcggctgccagcaccactgtgtccagctcacaatcactcggcatcgctgccagtgccggcccgggttccagctccaggaggacggcaggcattgtgtccgtagaagcccgtgtgccaacaggaacggcagctgcatgcacaggtgccaggtggtccggggcctcgcccgctgtgagtgccacgtgggctatcagctagcagcggacggcaaggcctgtgaagatgtggacgaatgtgccgcagggctggcccagtgtgcccatggctgcctcaacacccaggggtccttcaagtgcgtgtgtcacgygggctatgagctgggcgccgatggccggcagtgctaccggattgagatggaaatcgtgaacagctgtgaggccaacaacggcggctgctcccatggctgcagccacaccagtgctgggcccctgtgcacmtgtccccgcggctacgagctggacacagatcagaggacctgcatcgatgtcgacgactgtgcagacagcccgtgctgccagcaggtgtgcacctgcccggccggctggaggggcaccttctgcgagcatgcctgcccggccggcttctttggattggactgtcgcagtgcctgcaactgcaccgccggagctgcctgtgatgccgtgaatggctcctgcctctgccccgctggccgccggggcccccgctgtgccgagacctgcccagcccacacctacgggcacaattgcagccaggcctgtgcctgctttaacggggcctcctgtgaccctgtccacgggcagtgccactgtgcccctggctggatggggccctcctgcctgcaggcctgccctgccggcctgtacggagacaactgtcggcattcctgcctctgccagaacggagggacctgtgaccctgtctcaggccactgtgcgtgcccagagggctgggccggcctggcctgtgagaaggagtgcctcccccgggacgtcagagctggctgccggcacagcggcggttgcctcaacgggggcctgtgtgacccgcacacgggccgctgcctctgcccagccggctggactggggacaagtgtcagagcccctgcctgcggggctggtttggagaggcctgtgcccagcgctgcagctgcccgcctggcgctgcctgccaccacgtcactggggcctgccgctgtccccctggcttcactggctccggctgcgagcaggcctgcccacccggcagctttggggaggactgtgcgcagatgtgccagtgtcccggtgagaacccggcctgccaccctgccaccgggacctgctcatgtgctgctggctaccacggccccagctgccagcaacgatgtccgcccgggcggtatgggccaggctgtgaacagctgtgtgggtgtctcaacgggggctcctgtgatgcggccacgggggcctgccgctgccccactgggttcctcgggacggactgcaacctcacctgtccgcagggccgcttcggccccaactgcacccacgtgtgtgggtgtgggcagggggcggcctgcgaccctgtgaccggcacctgcctctgccccccggggagagccggcgtccgctgtgagcgaggctgcccccagaaccggtttggcgtgggctgcgagcacacctgctcctgcagaaatgggggcctgtgccacgccagcaacggcagctgctcctgtggcctgggctggacggggcggcactgcgagctggcctgtccccctgggcgctacggagccgcctgccatctggagtgctcctgccacaacaacagcacgtgtgagcctgccacgggcacctgccgctgcggccccggcttctatggccaggcctgcgagcacccctgtccccctggcttccacggggctggctgccaggggttgtgctggtgtcaacatggagccccctgcgascccatcagtggccgatgcctctgccctgccggcttccacggccacttctgtgagagggggtgtgagccaggttcattyggagagggctgccaccagcgctgtgactgtgacgggggggcaccctgtgaccctgtcaccggtctctgcctttgcccaccagggcgctcaggagccacctgtaacctggattgcagaaggggccagtttgggcccagctgcaccctgcactgtgactgcgggggtggggctgactgcgaccctgtcagtgggcagtgtcactgtgtggatggctacatggggcccacgtgccgggaaggtgggcccctccggctccccgagaacccgtccttagcccagggctcagcgggcacactgcccgcctccagcagacccacatcccggagcggtggaccagcgaggcactag

SEQ ID NO: 93 - protein, 1130 aa, Homo sapiens
  VARIANT (1)...(1130): Xaa = Any Amino Acid
MSFLEEARATGRAVVLALVLLLLPPVPILIXLTIGLERPXGQVGAWRLSRLWVRGTVLNAPGRVPAGWTRRSGLRGATLGAGGKPGRSAPAATLGSADRARAPVAASYGARGGGGSGEPPGPPVSRRAEEAPARTMSFLEEARAAGRAVVLALVLLLLPAVPVGASVPPRPLLPLQPGMPHVCAEQELTLVGRRQPCVQALSHTVPVWKAGCGWQAWCVGHERRTVYYMGYRQVYTTEARTVLRCCRGWMQQPDEEGCLSAECSAGLCFHGGRCVPGSAQPCHCPPGFQGPRCQYDVDECQTHNGXCQHRCVNTPGSYLCECKPGFRLHTDSRTCLAINSCALGNGGCQHHCVQLTITRHRCQCRPGFQLQEDGRHCVRRSPCANRNGSCMHRCQVVRGLARCECHVGYQLAADGKACEDVDECAAGLAQCAHGCLNTQGSFKCVCHXGYELGADGRQCYRIEMEIVNSCEANNGGCSHGCSHTSAGPLCXCPRGYELDTDQRTCIDVDDCADSPCCQQVCTCPAGWRGTFCEHACPAGFFGLDCRSACNCTAGAACDAVNGSCLCPAGRRGPRCAETCPAHTYGHNCSQACACFNGASCDPVHGQCHCAPGWMGPSCLQACPAGLYGDNCRHSCLCQNGGTCDPVSGHCACPEGWAGLACEKECLPRDVRAGCRHSGGCLNGGLCDPHTGRCLCPAGWTGDKCQSPCLRGWFGEACAQRCSCPPGAACHHVTGACRCPPGFTGSGCEQACPPGSFGEDCAQMCQCPGENPACHPATGTCSCAAGYHGPSCQQRCPPGRYGPGCEQLCGCLNGGSCDAATGACRCPTGFLGTDCNLTCPQGRFGPNCTHVCGCGQGAACDPVTGTCLCPPGRAGVRCERGCPQNRFGVGCEHTCSCRNGGLCHASNGSCSCGLGWTGRHCELACPPGRYGAACHLECSCHNNSTCEPATGTCRCGPGFYGQACEHPCPPGFHGAGCQGLCWCQHGAPCXPISGRCLCPAGFHGHFCERGCEPGSFGEGCHQRCDCDGGAPCDPVTGLCLCPPGRSGATCNLDCRRGQFGPSCTLHCDCGGGADCDPVSGQCHCVDGYMGPTCREGGPLRLPENPSLAQGSAGTLPASSRPTSRSGGPARH

SEQ ID NO: 94 - DNA, 2130 bp, Homo sapiens
  CDS (1)...(2130)
atgtcgttccttgaagaggcgagggcagcggggcgcgcggtggtcctggcgttggtgctgctgctgctccccgccgtgcccgtgggcgccagcgttccgccgcggcccctgctcccgctgcagcccggcatgccccacgtgtgtgctgagcaggagctgaccctggtgggccgccgccagccgtgcgtgcaggccttaagccacacggtgccggtgtggaaggccggctgtgggtggcaggcgtggtgcgtgggtcatgagcggagaaccgtctactacatgggctacaggcaggtgtataccacggaggcccggaccgtgctcaggtgctgccgagggtggatgcagcagcccgacgaggagggctgcctctcggctgaatgcagcgccggcctctgttttcacggtggccgttgtgtgccaggctcagcccagccgtgtcactgtccccccggcttccagggaccccgctgtcagtatgatgtggacgaatgccaaacccacaacggtggytgccagcaccggtgcgtgaacaccccaggctcctacctctgtgagtgcaagcccggcttccggctccacactgacagcaggacctgcctggccattaactcctgcgccctgggcaatggcggctgccagcaccactgtgtccagctcacaatcactcggcatcgctgccagtgccggcccgggttccagctccaggaggacggcaggcattgtgtccgtagaagcccgtgtgccaacaggaacggcagctgcatgcacaggtgccaggtggtccggggcctcgcccgctgtgagtgccacgtgggctatcagctagcagcggacggcaaggcctgtgaagatgtggacgaatgtgccgcagggctggcccagtgtgcccatggctgcctcaacacccaggggtccttcaagtgcgtgtgtcacgygggctatgagctgggcgccgatggccggcagtgctaccggattgagatggaaatcgtgaacagctgtgaggccaacaacggcggctgctcccatggctgcagccacaccagtgctgggcccctgtgcacmtgtccccgcggctacgagctggacacagatcagaggacctgcatcgatgtcgacgactgtgcagacagcccgtgctgccagcaggtgtgcacctgcccggccggctggaggggcaccttctgcgagcatgcctgcccggccggcttctttggattggactgtcgcagtgcctgcaactgcaccgccggagctgcctgtgatgccgtgaatggctcctgcctctgccccgctggccgccggggcccccgctgtgccgagacctgcccagcccacacctacgggcacaattgcagccaggcctgtgcctgctttaacggggcctcctgtgaccctgtccacgggcagtgccactgtgcccctggctggatggggccctcctgcctgcaggcctgccctgccggcctgtacggagacaactgtcggcattcctgcctctgccagaacggagggacctgtgaccctgtctcaggccactgtgcgtgcccagagggctgggccggcctggcctgtgagaaggagtgcctcccccgggacgtcagagctggctgccggcacagcggcggttgcctcaacgggggcctgtgtgacccgcacacgggccgctgcctctgcccagccggctggactggggacaagtgtcagagcccacctgctcccggcctgtcctggcccacagatccccacgggcccctcctagaagcctccgcagccctcatctttctgcagcctgcctgcggggctggtttggagaggcctgtgcccagcgctgcagctgcccgcctgscgctgcctgccaccacgtcactggggcctgccgctgtccccctggcttcactggctccggctgcgagcagggatgtccgcccgggcggtatgggccaggctgtgaacagctgtgtgggtgtctcaacgggggctcctgtgatgcggccacgggggcctgccgctgccccactgggttcctcgggacggactgcaacctcacctgtccgcagggccgcttcggccccaactgcmcccacgtgtgtgggtgtgggcagggggcggcctgcgaccctgtga

SEQ ID NO: 95 - protein, 709 aa, Homo sapiens
  VARIANT (1)...(709): Xaa = Any Amino Acid
MSFLEEARAAGRAVVLALVLLLLPAVPVGASVPPRPLLPLQPGMPHVCAEQELTLVGRRQPCVQALSHTVPVWKAGCGWQAWCVGHERRTVYYMGYRQVYTTEARTVLRCCRGWMQQPDEEGCLSAECSAGLCFHGGRCVPGSAQPCHCPPGFQGPRCQYDVDECQTHNGXCQHRCVNTPGSYLCECKPGFRLHTDSRTCLAINSCALGNGGCQHHCVQLTITRHRCQCRPGFQLQEDGRHCVRRSPCANRNGSCMHRCQVVRGLARCECHVGYQLAADGKACEDVDECAAGLAQCAHGCLNTQGSFKCVCHXGYELGADGRQCYRIEMEIVNSCEANNGGCSHGCSHTSAGPLCXCPRGYELDTDQRTCIDVDDCADSPCCQQVCTCPAGWRGTFCEHACPAGFFGLDCRSACNCTAGAACDAVNGSCLCPAGRRGPRCAETCPAHTYGHNCSQACACFNGASCDPVHGQCHCAPGWMGPSCLQACPAGLYGDNCRHSCLCQNGGTCDPVSGHCACPEGWAGLACEKECLPRDVRAGCRHSGGCLNGGLCDPHTGRCLCPAGWTGDKCQSPPAPGLSWPTDPHGPLLEASAALIFLQPACGAGLERPVPSAAAARLXLPATTSLGPAAVPLASLAPAASRDVRPGGMGQAVNSCVGVSTGAPVMRPRGPAAAPLGSSGRTATSPVRRAASAPTXPTCVGVGRGRPATL

SEQ ID NO: 96 - DNA, 2535 bp, Homo sapiens
  CDS (1)...(2535)
atgtcgttccttgaagaggcgagggcaacggggcgcgcggtggtcctggcgttggtgctgctgctgctcccccccgtgcccatcctaatackactcactatagggctcgagcggccgccygggcaggtgggggcgtggcggctttccaggctctgggtccggggcactgtgctcaacgcgccggggcgagttcctgcagggtggacccggcgatcaggtctccgcggtgccactttgggcgcgggcgggaagccgggacgctccgcacctgcagcgaccttgggctccgcggaccgggcgcgggcacctgtggctgcgtcctatggcgcacgtggaggcggaggctccggggagccgccggggccgcctgtgagccggagagcggaggaggcaccggcgcgcacgatgtcgttccttgaagaggcgagggcagcggggcgcgcggtggtcctggcgttggtgctgctgctgctccccgccgtgcccgtgggcgccagcgttccgccgcggcccctgctcccgctgcagcccggcatgccccacgtgtgtgctgagcaggagctgaccctggtgggccgccgccagccgtgcgtgcaggccttaagccacacggtgccggtgtggaaggccggctgtgggtggcaggcgtggtgcgtgggtcatgagcggagaaccgtctactacatgggctacaggcaggtgtataccacggaggcccggaccgtgctcaggtgctgccgagggtggatgcagcagcccgacgaggagggctgcctctcggctgaatgcagcgccggcctctgttttcacggtggccgttgtgtgccaggctcagcccagccgtgtcactgtccccccggcttccagggaccccgctgtcagtatgatgtggacgaatgccaaacccacaacggtggytgccagcaccggtgcgtgaacaccccaggctcctacctctgtgagtgcaagcccggcttccggctccacactgacagcaggacctgcctggccattaactcctgcgccctgggcaatggcggctgccagcaccactgtgtccagctcacaatcactcggcatcgctgccagtgccggcccgggttccagctccaggaggacggcaggcattgtgtccgtagaagcccgtgtgccaacaggaacggcagctgcatgcacaggtgccaggtggtccggggcctcgcccgctgtgagtgccacgtgggctatcagctagcagcggacggcaaggcctgtgaagatgtggacgaatgtgccgcagggctggcccagtgtgcccatggctgcctcaacacccaggggtccttcaagtgcgtgtgtcacgygggctatgagctgggcgccgatggccggcagtgctaccggattgagatggaaatcgtgaacagctgtgaggccaacaacggcggctgctcccatggctgcagccacaccagtgctgggcccctgtgcacmtgtccccgcggctacgagctggacacagatcagaggacctgcatcgatgtcgacgactgtgcagacagcccgtgctgccagcaggtgtgcacctgcccggccggctggaggggcaccttctgcgagcatgcctgcccggccggcttctttggattggactgtcgcagtgcctgcaactgcaccgccggagctgcctgtgatgccgtgaatggctcctgcctctgccccgctggccgccggggcccccgctgtgccgagacctgcccagcccacacctacgggcacaattgcagccaggcctgtgcctgctttaacggggcctcctgtgaccctgtccacgggcagtgccactgtgcccctggctggatggggccctcctgcctgcaggcctgccctgccggcctgtacggagacaactgtcggcattcctgcctctgccagaacggagggacctgtgaccctgtctcaggccactgtgcgtgcccagagggctgggccggcctggcctgtgagaaggagtgcctcccccgggacgtcagagctggctgccggcacagcggcggttgcctcaacgggggcctgtgtgacccgcacacgggccgctgcctctgcccagccggctggactggggacaagtgtcagagcccacctgctcccggcctgtcctggcccacagatccccacgggcccctcctagaagcctccgcagccctcatctttctgcagcctgcctgcggggctggtttggagaggcctgtgcccagcgctgcagctgcccgcctgscgctgcctgccaccacgtcactggggcctgccgctgtccccctggcttcactggctccggctgcgagcagggatgtccgcccgggcggtatgggccaggctgtgaacagctgtgtgggtgtctcaacgggggctcctgtgatgcggccacgggggcctgccgctgccccactgggttcctcgggacggactgcaacctcacctgtccgcagggccgcttcggccccaactgcmcccacgtgtgtgggtgtgggcagggggcggcctgcgaccctgtga

SEQ ID NO: 97 - protein, 844 aa, Homo sapiens
  VARIANT (1)...(844): Xaa = Any Amino Acid
MSFLEEARATGRAVVLALVLLLLPPVPILIXLTIGLERPXGQVGAWRLSRLWVRGTVLNAPGRVPAGWTRRSGLRGATLGAGGKPGRSAPAATLGSADRARAPVAASYGARGGGGSGEPPGPPVSRRAEEAPARTMSFLEEARAAGRAVVLALVLLLLPAVPVGASVPPRPLLPLQPGMPHVCAEQELTLVGRRQPCVQALSHTVPVWKAGCGWQAWCVGHERRTVYYMGYRQVYTTEARTVLRCCRGWMQQPDEEGCLSAECSAGLCFHGGRCVPGSAQPCHCPPGFQGPRCQYDVDECQTHNGXCQHRCVNTPGSYLCECKPGFRLHTDSRTCLAINSCALGNGGCQHHCVQLTITRHRCQCRPGFQLQEDGRHCVRRSPCANRNGSCMHRCQVVRGLARCECHVGYQLAADGKACEDVDECAAGLAQCAHGCLNTQGSFKCVCHXGYELGADGRQCYRIEMEIVNSCEANNGGCSHGCSHTSAGPLCXCPRGYELDTDQRTCIDVDDCADSPCCQQVCTCPAGWRGTFCEHACPAGFFGLDCRSACNCTAGAACDAVNGSCLCPAGRRGPRCAETCPAHTYGHNCSQACACFNGASCDPVHGQCHCAPGWMGPSCLQACPAGLYGDNCRHSCLCQNGGTCDPVSGHCACPEGWAGLACEKECLPRDVRAGCRHSGGCLNGGLCDPHTGRCLCPAGWTGDKCQSPPAPGLSWPTDPHGPLLEASAALIFLQPACGAGLERPVPSAAAARLXLPATTSLGPAAVPLASLAPAASRDVRPGGMGQAVNSCVGVSTGAPVMRPRGPAAAPLGSSGRTATSPVRRAASAPTXPTCVGVGRGRPATL

SEQ ID NO: 98 - DNA, 2373 bp, Homo sapiens
  CDS (1)...(2373)
atgtcgttccttgaagaggcgagggcagcggggcgcgcggtggtcctggcgttggtgctgctgctgctccccgccgtgcccgtgggcgccagcgttccgccgcggcccctgctcccgctgcagcccggcatgccccacgtgtgtgctgagcaggagctgaccctggtgggccgccgccagccgtgcgtgcaggccttaagccacacggtgccggtgtggaaggccggctgtgggtggcaggcgtggtgcgtgggtcatgagcggagaaccgtctactacatgggctacaggcaggtgtataccacggaggcccggaccgtgctcaggtgctgccgagggtggatgcagcagcccgacgaggagggctgcctctcggctgaatgcagcgccggcctctgttttcacggtggccgttgtgtgccaggctcagcccagccgtgtcactgtccccccggcttccagggaccccgctgtcagtatgatgtggacgaatgccaaacccacaacggtggytgccagcaccggtgcgtgaacaccccaggctcctacctctgtgagtgcaagcccggcttccggctccacactgacagcaggacctgcctggccattaactcctgcgccctgggcaatggcggctgccagcaccactgtgtccagctcacaatcactcggcatcgctgccagtgccggcccgggttccagctccaggaggacggcaggcattgtgtccgtagaagcccgtgtgccaacaggaacggcagctgcatgcacaggtgccaggtggtccggggcctcgcccgctgtgagtgccacgtgggctatcagctagcagcggacggcaaggcctgtgaagatgtggacgaatgtgccgcagggctggcccagtgtgcccatggctgcctcaacacccaggggtccttcaagtgcgtgtgtcacgygggctatgagctgggcgccgatggccggcagtgctaccggattgagatggaaatcgtgaacagctgtgaggccaacaacggcggctgctcccatggctgcagccacaccagtgctgggcccctgtgcacmtgtccccgcggctacgagctggacacagatcagaggacctgcatcgatgtcgacgactgtgcagacagcccgtgctgccagcaggtgtgcaccaacaaccctggcgggtacgagtgcggctgctacgccggctaccggctcagtgccgatggctgcggctgtgaggatgtggatgagtgcgcctccagccgtggcggctgcgagcaccactgcaccaacctggccggctccttccagtgctcctgcgaggccggctaccggctgcacgaggaccgtaggggctgcagccccctggaggagccgatggtggacctggacggcgagctgcctttcgtgcggcccctgccccacattgccgtgctccaggacgagctgccgcaactcttccaggatgacgacgtcggggccgatgaggaagaggcagagttgcggggcgaacacacgctcacagagaagtttgtctgcctggatgactcctttggccatgactgcagcttgacctgtgatgactgcaggaacggagggacctgcctcctgggcctggatggctgtgattgccccgagggctggactgggctcatctgcaatgagacttgtcctccggacacctttgggaagaactgcagcttctcctgcagctgtcagaatggtgggacctgcgactctgtcacgggggcctgccgctgccccccgggtgtcagtggaactaactgtgaggatggctgccccaagggctactatggcaagcactgtygcaagaaatgcaactgtgccaaccggggccggtgccaccgcctmtacggggcctgcctctgcgacccagggctctacggccgcttctgccacctcacctgcccgccgtgggcctttgggccgggctgctcggaggagtgccagtgtgtgcagccccacacgcagtcctgtgacaagagggatggcagctgctcctgcaaggctggcttccggggcgagcgctgtcaggcagagtgtgagcygggctactttgggccggggtgctggcaggcatgcacctgcccagtgggcgtggcctgtgactccgtgagcggcgagtgtgggaagcggtgtcctgctggcttccagggagaggactgtggccaagtccctgctctctataccagagacagtgaacaggcctcgccagagaagcacctccaccactcccggagcccccagttcctgagaggaggaaggctcctcccctgcccctcctctgctcctcctctgccccttcctctcttttctttaagagcctgtggtgctccgaggataagccacaggcgatga

SEQ ID NO: 99 - protein, 790 aa, Homo sapiens
  VARIANT (1)...(790): Xaa = Any Amino Acid
MSFLEEARAAGRAVVLALVLLLLPAVPVGASVPPRPLLPLQPGMPHVCAEQELTLVGRRQPCVQALSHTVPVWKAGCGWQAWCVGHERRTVYYMGYRQVYTTEARTVLRCCRGWMQQPDEEGCLSAECSAGLCFHGGRCVPGSAQPCHCPPGFQGPRCQYDVDECQTHNGXCQHRCVNTPGSYLCECKPGFRLHTDSRTCLAINSCALGNGGCQHHCVQLTITRHRCQCRPGFQLQEDGRHCVRRSPCANRNGSCMHRCQVVRGLARCECHVGYQLAADGKACEDVDECAAGLAQCAHGCLNTQGSFKCVCHXGYELGADGRQCYRIEMEIVNSCEANNGGCSHGCSHTSAGPLCXCPRGYELDTDQRTCIDVDDCADSPCCQQVCTNNPGGYECGCYAGYRLSADGCGCEDVDECASSRGGCEHHCTNLAGSFQCSCEAGYRLHEDRRGCSPLEEPMVDLDGELPFVRPLPHIAVLQDELPQLFQDDDVGADEEEAELRGEHTLTEKFVCLDDSFGHDCSLTCDDCRNGGTCLLGLDGCDCPEGWTGLICNETCPPDTFGKNCSFSCSCQNGGTCDSVTGACRCPPGVSGTNCEDGCPKGYYGKHCXKKCNCANRGRCHRXYGACLCDPGLYGRFCHLTCPPWAFGPGCSEECQCVQPHTQSCDKRDGSCSCKAGFRGERCQAECEXGYFGPGCWQACTCPVGVACDSVSGECGKRCPAGFQGEDCGQVPALYTRDSEQASPEKHLHHSRSPQFLRGGRLLPCPSSAPPLPLPLFSLRACGAPRISHRR

SEQ ID NO: 100 - DNA, 2778 bp, Homo sapiens
  CDS (1)...(2778)
atgtcgttccttgaagaggcgagggcaacggggcgcgcggtggtcctggcgttggtgctgctgctgctcccccccgtgcccatcctaatackactcactatagggctcgagcggccgccygggcaggtgggggcgtggcggctttccaggctctgggtccggggcactgtgctcaacgcgccggggcgagttcctgcagggtggacccggcgatcaggtctccgcggtgccactttgggcgcgggcgggaagccgggacgctccgcacctgcagcgaccttgggctccgcggaccgggcgcgggcacctgtggctgcgtcctatggcgcacgtggaggcggaggctccggggagccgccggggccgcctgtgagccggagagcggaggaggcaccggcgcgcacgatgtcgttccttgaagaggcgagggcagcggggcgcgcggtggtcctggcgttggtgctgctgctgctccccgccgtgcccgtgggcgccagcgttccgccgcggcccctgctcccgctgcagcccggcatgccccacgtgtgtgctgagcaggagctgaccctggtgggccgccgccagccgtgcgtgcaggccttaagccacacggtgccggtgtggaaggccggctgtgggtggcaggcgtggtgcgtgggtcatgagcggagaaccgtctactacatgggctacaggcaggtgtataccacggaggcccggaccgtgctcaggtgctgccgagggtggatgcagcagcccgacgaggagggctgcctctcggctgaatgcagcgccggcctctgttttcacggtggccgttgtgtgccaggctcagcccagccgtgtcactgtccccccggcttccagggaccccgctgtcagtatgatgtggacgaatgccaaacccacaacggtggytgccagcaccggtgcgtgaacaccccaggctcctacctctgtgagtgcaagcccggcttccggctccacactgacagcaggacctgcctggccattaactcctgcgccctgggcaatggcggctgccagcaccactgtgtccagctcacaatcactcggcatcgctgccagtgccggcccgggttccagctccaggaggacggcaggcattgtgtccgtagaagcccgtgtgccaacaggaacggcagctgcatgcacaggtgccaggtggtccggggcctcgcccgctgtgagtgccacgtgggctatcagctagcagcggacggcaaggcctgtgaagatgtggacgaatgtgccgcagggctggcccagtgtgcccatggctgcctcaacacccaggggtccttcaagtgcgtgtgtcacgygggctatgagctgggcgccgatggccggcagtgctaccggattgagatggaaatcgtgaacagctgtgaggccaacaacggcggctgctcccatggctgcagccacaccagtgctgggcccctgtgcacmtgtccccgcggctacgagctggacacagatcagaggacctgcatcgatgtcgacgactgtgcagacagcccgtgctgccagcaggtgtgcaccaacaaccctggcgggtacgagtgcggctgctacgccggctaccggctcagtgccgatggctgcggctgtgaggatgtggatgagtgcgcctccagccgtggcggctgcgagcaccactgcaccaacctggccggctccttccagtgctcctgcgaggccggctaccggctgcacgaggaccgtaggggctgcagccccctggaggagccgatggtggacctggacggcgagctgcctttcgtgcggcccctgccccacattgccgtgctccaggacgagctgccgcaactcttccaggatgacgacgtcggggccgatgaggaagaggcagagttgcggggcgaacacacgctcacagagaagtttgtctgcctggatgactcctttggccatgactgcagcttgacctgtgatgactgcaggaacggagggacctgcctcctgggcctggatggctgtgattgccccgagggctggactgggctcatctgcaatgagacttgtcctccggacacctttgggaagaactgcagcttctcctgcagctgtcagaatggtgggacctgcgactctgtcacgggggcctgccgctgccccccgggtgtcagtggaactaactgtgaggatggctgccccaagggctactatggcaagcactgtygcaagaaatgcaactgtgccaaccggggccggtgccaccgcctmtacggggcctgcctctgcgacccagggctctacggccgcttctgccacctcacctgcccgccgtgggcctttgggccgggctgctcggaggagtgccagtgtgtgcagccccacacgcagtcctgtgacaagagggatggcagctgctcctgcaaggctggcttccggggcgagcgctgtcaggcagagtgtgagcygggctactttgggccggggtgctggcaggcatgcacctgcccagtgggcgtggcctgtgactccgtgagcggcgagtgtgggaagcggtgtcctgctggcttccagggagaggactgtggccaagtccctgctctctataccagagacagtgaacaggcctcgccagagaagcacctccaccactcccggagcccccagttcctgagaggaggaaggctcctcccctgcccctcctctgctcctcctctgccccttcctctcttttctttaagagcctgtggtgctccgaggataagccacaggcgatga

SEQ ID NO: 101 - protein, 925 aa, Homo sapiens
  VARIANT (1)...(925): Xaa = Any Amino Acid
MSFLEEARATGRAVVLALVLLLLPPVPILIXLTIGLERPXGQVGAWRLSRLWVRGTVLNAPGRVPAGWTRRSGLRGATLGAGGKPGRSAPAATLGSADRARAPVAASYGARGGGGSGEPPGPPVSRRAEEAPARTMSFLEEARAAGRAVVLALVLLLLPAVPVGASVPPRPLLPLQPGMPHVCAEQELTLVGRRQPCVQALSHTVPVWKAGCGWQAWCVGHERRTVYYMGYRQVYTTEARTVLRCCRGWMQQPDEEGCLSAECSAGLCFHGGRCVPGSAQPCHCPPGFQGPRCQYDVDECQTHNGXCQHRCVNTPGSYLCECKPGFRLHTDSRTCLAINSCALGNGGCQHHCVQLTITRHRCQCRPGFQLQEDGRHCVRRSPCANRNGSCMHRCQVVRGLARCECHVGYQLAADGKACEDVDECAAGLAQCAHGCLNTQGSFKCVCHXGYELGADGRQCYRIEMEIVNSCEANNGGCSHGCSHTSAGPLCXCPRGYELDTDQRTCIDVDDCADSPCCQQVCTNNPGGYECGCYAGYRLSADGCGCEDVDECASSRGGCEHHCTNLAGSFQCSCEAGYRLHEDRRGCSPLEEPMVDLDGELPFVRPLPHIAVLQDELPQLFQDDDVGADEEEAELRGEHTLTEKFVCLDDSFGHDCSLTCDDCRNGGTCLLGLDGCDCPEGWTGLICNETCPPDTFGKNCSFSCSCQNGGTCDSVTGACRCPPGVSGTNCEDGCPKGYYGKHCXKKCNCANRGRCHRXYGACLCDPGLYGRFCHLTCPPWAFGPGCSEECQCVQPHTQSCDKRDGSCSCKAGFRGERCQAECEXGYFGPGCWQACTCPVGVACDSVSGECGKRCPAGFQGEDCGQVPALYTRDSEQASPEKHLHHSRSPQFLRGGRLLPCPSSAPPLPLPLFSLRACGAPRISHRR

SEQ ID NO: 102 - DNA, 2868 bp, Homo sapiens
  CDS (1)...(2868)
atgtgggccggactgctccttcgggccgcctgtgtcgcgctcctgctgccgggggcaccagcccgaggctacaccgggaggaagccgcccgggcacttcgcggccgagagacgccgactgggcccccacgtctgcctctctgggtttgggagtggctgctgccctggctgggcgccctctatgggtggtgggcactgcaccctgcccctctgctccttcggctgtgggagtggcatctgcatcgctcccaatgtctgctcctgccaggatggagagcaaggggccacctgcccagaaacccatggaccatgtggggagtacggctgtgaccttacctgcaaccatggaggctgtcaggaggtggcccgagtgtgccccgtgggcttctcgatgacggagacagctgttggcatcaggtgtacagacattgacgaatgtgtaacctcctcctgcgagggccactgtgtgaacacagaaggtgggtttgtgtgcgagtgtgggccgggcatgcagctgtttgccgaccgccacagctgccaagacactgacgaatgcctagggactccctgtcagcagagatgtaaaaacagcattggcagctacaagtgttcctgtcgaactggcttccaccttcatggcaaccggcactcctgtgtagatgtaaacgagtgtcggaggccattggagaggcgagtctgtcaccattcctgccacaacaccgtgggcagcttcctatgcacatgccgacctggcttcaggctccgagctgaccgcgtgtcctgtgaagctttcccgaaagccgtgctggccccatctgccatcctgcaaccccggcaacacccgtccaagatgcttctgttgcttcctgaggccggccggcctgccctgtccccaggacatagccctccttctggggctccagggcccccagccggagtcaggaccacccgcctgccatctcccaccccacgactacccacatcctccccttctgcccctgtgtggctgctgtccaccctgctggccaccccagtgcctactgcctccctgctggggaacctcagacccccctcactccttcagggggaggtgatggggaccccttcctcacccaggggccctgagtccccccgactggcagcagggccctctccctgctggcacctgggagccatgcatgaatcaaggagtcgctggacagagcctgggtgttcccagtgctggtgcgaggacgggaaggtgacctgtgaaaaggtgaggtgtgaagctgcttgttcccacccaattccctccagagatggtgggtgctgcccatcgtgcacaggctgttttcacagtggtgtcgtccgagctgaaggggatgtgttttcacctcccaatgagaactgcaccgtctgtgtctgtctggctggaaacgtgtcctgcatctctcctgagtgtccttctggcccctgtcagacccccccacagacggattgctgtacttgtgttccagtgagatgctatttccacggccggtggtacgcagacggggctgtgttcagtgggggtggtgacgagtgtaccacctgtgtttgccagaatggggaggtggagtgctccttcatgccctgccctgagctggcctgcccccgagaagagtggcggctgggccctgggcagtgttgcttcacctgccaggagcccacaccctcgacaggctgctctcttgacgacaacggggttgagtttccgattggacagatctggtcgcctggtgacccctgtgagttatgcatctgccaggcagatggctcggtgagctgcaagaggacagactgtgtggactcctgccctcacccgatccggatccctggacagtgctgcccagactgttcagcaggctgcacctacacaggcagaatcttctataacaacgagaccttcccgtctgtgctggacccatgtctgagctgcatctgcctgctgggctcagtggcctgttcccccgtggactgccccatcacctgtacctaccctttccaccctgacggggagtgctgccccgtgtgccgagactgcaactacgagggaaggaaggtggcgaatggccaggtgttcaccttggatgatgaaccctgcacccggtgcacgtgccagctgggagaggtgagctgtgagaaggttccctgccagcgggcctgtgccgaccctgccctgcttcctggggactgctgctcttcctgtccagattccctgtctcctctggaagaaaagcaggggctctcccctcacggaaatgtggcattcagcaaagctggtcggagcctgcatggagacactgaggcccctgtcaactgtagctcctgtcctgggcccccgacagcatcaccctcgaggccggtgcttcatctcctccagctccttttaagaacgaacttgatgaaaacacagactttacctacaagcccggcaggagctcatggtccacactcactcgctttggggctgacagccactttcccaggggagcctggggcctcccctcgactctcaccagggccttcgacccctccaggagcccccactctacctctagcttccccaggggctcctcagccacctcctgtgactccagagcgctcgttctcagcctctggggcccagatagtgtccaggtggcctcctctgcctggcaccctcctgacggaagcttcagcactttccatgatggaccccagcccctcgaagacccccatcaccctcctcgggcctcgcgtgctttctcccaccacctctagactctccacagcccttgcagccaccacccaccctggcccccagcagcccccagtgggggcttctcggggggaagagtccaccatgtaa

SEQ ID NO: 103 - protein, 955 aa, Homo sapiens
MWAGLLLRAACVALLLPGAPARGYTGRKPPGHFAAERRRLGPHVCLSGFGSGCCPGWAPSMGGGHCTLPLCSFGCGSGICIAPNVCSCQDGEQGATCPETHGPCGEYGCDLTCNHGGCQEVARVCPVGFSMTETAVGIRCTDIDECVTSSCEGHCVNTEGGFVCECGPGMQLFADRHSCQDTDECLGTPCQQRCKNSIGSYKCSCRTGFHLHGNRHSCVDVNECRRPLERRVCHHSCHNTVGSFLCTCRPGFRLRADRVSCEAFPKAVLAPSAILQPRQHPSKMLLLLPEAGRPALSPGHSPPSGAPGPPAGVRTTRLPSPTPRLPTSSPSAPVWLLSTLLATPVPTASLLGNLRPPSLLQGEVMGTPSSPRGPESPRLAAGPSPCWHLGAMHESRSRWTEPGCSQCWCEDGKVTCEKVRCEAACSHPIPSRDGGCCPSCTGCFHSGVVRAEGDVFSPPNENCTVCVCLAGNVSCISPECPSGPCQTPPQTDCCTCVPVRCYFHGRWYADGAVFSGGGDECTTCVCQNGEVECSFMPCPELACPREEWRLGPGQCCFTCQEPTPSTGCSLDDNGVEFPIGQIWSPGDPCELCICQADGSVSCKRTDCVDSCPHPIRIPGQCCPDCSAGCTYTGRIFYNNETFPSVLDPCLSCICLLGSVACSPVDCPITCTYPFHPDGECCPVCRDCNYEGRKVANGQVFTLDDEPCTRCTCQLGEVSCEKVPCQRACADPALLPGDCCSSCPDSLSPLEEKQGLSPHGNVAFSKAGRSLHGDTEAPVNCSSCPGPPTASPSRPVLHLLQLLLRTNLMKTQTLPTSPAGAHGPHSLALGLTATFPGEPGASPRLSPGPSTPPGAPTLPLASPGAPQPPPVTPERSFSASGAQIVSRWPPLPGTLLTEASALSMMDPSPSKTPITLLGPRVLSPTTSRLSTALAATTHPGPQQPPVGASRGEESTM

SEQ ID NO: 104 - DNA, 4884 bp, Homo sapiens
  CDS (1)...(4884)
atggccggggtcggggccgctgcgctgtcccttctcctgcacctcggggccctggcgctggccgcgggcgcggaaggtggggctgtccccagggagccccctgggcagcagacaactgcccattcctcagtccttgctgggaactcccaggagcagtggcaccccctgcgagagtggctggggcgactggaggctgcagtgatggagctcagagaacagaataaggacctgcagacgagggtgaggcagctggagtcctgtgagtgccaccctgcatctccccagtgctgggggctggggcgtgcctggcccgagggggcacgctgggagcctgacgcctgcacagcctgcgtctgccaggatggggccgctcactgtggcccccaagcacacctgccccattgcaggggctgcagccaaaatggccagacctacggcaacggggagaccttctccccagatgcctgcaccacctgccgctgtctggaaggtaccatcacttgcaaccagaagccatgcccaagaggaccctgccctgagccaggagcatgctgcccgcactgtaagccaggctgtgattatgaggggcagctttatgaggagggggtcaccttcctgtccagctccaacccttgtctacagtgcacctgcctgaggagccgagttcgctgcatggccctgaagtgcccgcctagcccctgcccagagccagtgctgaggcctgggcactgctgcccaacctgccaaggctgcacagaaggtggctctcactgggaacatggccaagagtggacaacacctggggacccctgccgaatctgccggtgcctggagggtcacatccagtgccgccagcgagaatgtgccagcctgtgtccatacccagcccggcccctcccaggcacctgctgccctgtgtgtgatggctgtttcctaaacgggcgggagcaccgcagcggggagcctgtgggctcaggggacccctgctcgcactgccgctgtgctaatgggagtgtccagtgtgagcctctgccctgcccgccagtgccctgcagacacccaggcaagatccctgggcagtgctgccctgtctgcgatggctgtgagtaccagggacaccagtatcagagccaggagaccttcagactccaagagcggggcctctgtgtccgctgctcctgccaggctggcgaggtctcctgtgaggagcaggagtgcccagtcaccccctgtgccctgcctgcctctggccgccagctctgcccagcctgtgagctggatggagaggagtttgctgagggagtccagtgggagcctgatggtcggccctgcaccgcctgcgtctgtcaagatggggtacccaagtgcggggctgtgctctgccccccagccccctgccagcaccccacccagccccctggtgcctgctgccccagctgtgacagctgcacctaccacagccaagtgtatgccaatgggcagaacttcacggatgcagacagcccttgccatgcctgccactgtcaggatggaactgtgacatgctccttggttgactgccctcccacgacctgtgccaggccccagagtggaccaggccagtgttgccccaggtgcccagactgcatcctggaggaagaggtgtttgtggacggcgagagcttctcccacccccgagacccctgccaggagtgccgatgccaggaaggccatgcccactgccagcctcgcccctgccccagggccccctgtgcccacccgctgcctgggacctgctgcccgaacgactgcagcggctgtgcctttggcgggaaagagtaccccagcggagcggacttcccccacccctctgacccctgccgtctgtgtcgctgtctgagcggcaacgtgcagtgcctggcccgccgctgcgtgccgctgccctgtccagagcctgtcctgctgccgggagagtgctgcccgcagtgcccagccgccccagcccccgccggctgcccacggcccggcgcggcccacgcccgccaccaggagtacttctccccgcccggcgatccctgccgccgctgcctctgcctcgacggctccgtgtcctgccagcggctgccctgcccgcccgcgccctgcgcgcacccgcgccaggggccttgctgcccctcctgcgacggctgcctgtaccaggggaaggagtttgccagcggggagcgcttcccatcgcccactgctgcctgccacctctgcctttgctgggagggcagcgtgagctgcgagcccaaggcatgtgcccctgcactgtgccccttccctgccaggggcgactgctgccctgactgtgatggctgtgagtacctgggggagtcctacctgagtaaccaggagttcccagacccccgagaaccctgcaacctgtgtacctgtcttggaggcttcgtgacctgcggccgccggccctgtgagcctccgggctgcagccacccactcatcccctctgggcactgctgcccgacctgccagggatgccgctaccatggcgtcactactgcctccggagagacccttcctgacccacttgaccctacctgctccctctgcacctgccaggaaggttccatgcgctgccaaaagaagccatgtgccccagctctctgcccccacccctctccaggcccctgcttctgccctgtttgccacagttgtctctctcagggccgggagcaccaggatggggaggagtttgagggaccagcaggcagctgtgagtggtgtcgctgtcaggctggccaggtcagctgtgtgcggctgcagtgcccaccccttccctgcaagctccaggtcaccgagcgggggagctgctgccctcgctgcagaggctgcctggctcatggggaagagcaccccgaaggcagtagatgggtgccccccgacagtgcctgctcctcctgtgtgtgtcacgagggcgtcgtcacctgtgcacgcatccagtgcatcagctcttgcgcccagccccgccaagggccccatgactgctgtcctcaatgctctgactgtgagcatgagggccggaagtacgagcctggggagagcttccagcctggggcagacccctgtgaagtgtgcatctgcgagccacagcctgaggggcctcccagccttcgctgtcaccggcggcagtgtcccagcctggtgggctgcccccccagccagctcctgccccctgggccccagcactgctgtcccacctgtgccgaggccttgagtaactgttcagagggcctgctgggatctgagctagccccaccagacccctgctacacgtgccagtgccaggacctgacatggctctgcatccaccaggcttgtcctgagctcagctgtcccctctcagagcgccacactccccctgggagctgctgccccgtatgccgggaatgtgtggtggaggccgagggccggagagtggcagatggagagagctggcgggaccccagcaatgcgtgcatcgcctgcacctgccatcggggccatgtggagtgccacctcgaggagtgccaggccctctcctgcccccatggctgggcgaaggtgccccaggctgacagctgctgtgagcgatgccaagctcccacccagtcctgcgtgcaccagggccgtgaggtggcctctggagagcgctggactgtggacacctgcaccagctgctcctgcatggcgggcaccgtgcgttgccagagccagcgctgctcaccgctctcgtgtggccccgacaaggcccctgccctgagtcctggcagctgctgcccccgctgcctgcctcggcccgcttcctgcatggccttcggagacccccattaccgcaccttcgacggccgcctgctgcacttccagggcagttgcagctatgtgctggccaaggactgccacagcggggacttcagtgtgcacgtgaccaatgatgaccggggccggagcggtgtggcctggacccaggaggtggcggtgctgctgggagacatggccgtgcggctgctgcaggacggggcagtcacggtggatgggcacccggtggccttgcccttcctgcaggagccgctgctgtatgtggagctgcgaggacacactgtgatcctgcacgcccagcccgggctccaggtgctgtgggatgggcagtcccaggtggaggtgagcgtacctggctcctaccagggccggacttgtgggctctgtgggaacttcaatggctttgcccaggacgatctgcagggccctgaggggctgctcctgccctcggaggctgcgtttgggaatagctggcaggtctcagaggggctgtggcctggccggccctgttctgcaggccgagaggtggatccgtgccgggcagcaggttaccgtgccaggcgtgaggccaatgcccggtgtggggtgctgaagtcctccccattcagtcgctgccatgctgtggtgccaccggagcccttctttgccgcctgtgtgtatgacctgtgtgcctgtggccctggctcctccgctgatgcctgcctctgtgatgccctggaagcctacgccagtcactgtcgccaggcaggagtgacacctacctggcgaggccccacgctgtgtgtggtaggctgccccctggagcgtggcttcgtgtttgatgagtgcggcccaccctgtccccgcacctgcttcaatcagcatatccccctgggggagctggcagcccactgcgtgaggccctgcgtgcccggctgccagtgccctgcaggcctggtggagcatgaggcccactgcatcccacccgaggcctgcccccaagtcctgctcactggagaccagccacttggtgctcggcccagccccagccgggagccccaggagacaccc

SEQ ID NO: 105 - protein, 1628 aa, Homo sapiens
MAGVGAAALSLLLHLGALALAAGAEGGAVPREPPGQQTTAHSSVLAGNSQEQWHPLREWLGRLEAAVMELREQNKDLQTRVRQLESCECHPASPQCWGLGRAWPEGARWEPDACTACVCQDGAAHCGPQAHLPHCRGCSQNGQTYGNGETFSPDACTTCRCLEGTITCNQKPCPRGPCPEPGACCPHCKPGCDYEGQLYEEGVTFLSSSNPCLQCTCLRSRVRCMALKCPPSPCPEPVLRPGHCCPTCQGCTEGGSHWEHGQEWTTPGDPCRICRCLEGHIQCRQRECASLCPYPARPLPGTCCPVCDGCFLNGREHRSGEPVGSGDPCSHCRCANGSVQCEPLPCPPVPCRHPGKIPGQCCPVCDGCEYQGHQYQSQETFRLQERGLCVRCSCQAGEVSCEEQECPVTPCALPASGRQLCPACELDGEEFAEGVQWEPDGRPCTACVCQDGVPKCGAVLCPPAPCQHPTQPPGACCPSCDSCTYHSQVYANGQNFTDADSPCHACHCQDGTVTCSLVDCPPTTCARPQSGPGQCCPRCPDCILEEEVFVDGESFSHPRDPCQECRCQEGHAHCQPRPCPRAPCAHPLPGTCCPNDCSGCAFGGKEYPSGADFPHPSDPCRLCRCLSGNVQCLARRCVPLPCPEPVLLPGECCPQCPAAPAPAGCPRPGAAHARHQEYFSPPGDPCRRCLCLDGSVSCQRLPCPPAPCAHPRQGPCCPSCDGCLYQGKEFASGERFPSPTAACHLCLCWEGSVSCEPKACAPALCPFPARGDCCPDCDGCEYLGESYLSNQEFPDPREPCNLCTCLGGFVTCGRRPCEPPGCSHPLIPSGHCCPTCQGCRYHGVTTASGETLPDPLDPTCSLCTCQEGSMRCQKKPCAPALCPHPSPGPCFCPVCHSCLSQGREHQDGEEFEGPAGSCEWCRCQAGQVSCVRLQCPPLPCKLQVTERGSCCPRCRGCLAHGEEHPEGSRWVPPDSACSSCVCHEGVVTCARIQCISSCAQPRQGPHDCCPQCSDCEHEGRKYEPGESFQPGADPCEVCICEPQPEGPPSLRCHRRQCPSLVGCPPSQLLPPGPQHCCPTCAEALSNCSEGLLGSELAPPDPCYTCQCQDLTWLCIHQACPELSCPLSERHTPPGSCCPVCRECVVEAEGRRVADGESWRDPSNACIACTCHRGHVECHLEECQALSCPHGWAKVPQADSCCERCQAPTQSCVHQGREVASGERWTVDTCTSCSCMAGTVRCQSQRCSPLSCGPDKAPALSPGSCCPRCLPRPASCMAFGDPHYRTFDGRLLHFQGSCSYVLAKDCHSGDFSVHVTNDDRGRSGVAWTQEVAVLLGDMAVRLLQDGAVTVDGHPVALPFLQEPLLYVELRGHTVILHAQPGLQVLWDGQSQVEVSVPGSYQGRTCGLCGNFNGFAQDDLQGPEGLLLPSEAAFGNSWQVSEGLWPGRPCSAGREVDPCRAAGYRARREANARCGVLKSSPFSRCHAVVPPEPFFAACVYDLCACGPGSSADACLCDALEAYASHCRQAGVTPTWRGPTLCVVGCPLERGFVFDECGPPCPRTCFNQHIPLGELAAHCVRPCVPGCQCPAGLVEHEAHCIPPEACPQVLLTGDQPLGARPSPSREPQETP

SEQ ID NO: 106 - DNA, 4779 bp, Homo sapiens
  CDS (1)...(4779)
atggccggggtcggggccgctgcgctgtcccttctcctgcacctcggggccctggcgctggccgcgggcgcggaaggtggggctgtccccagggagccccctgggcagcagacaactgcccattcctcagtccttgctgggaactcccaggagcagtggcaccccctgcgagagtggctggggcgactggaggctgcagtgatggagctcagagaacagaataaggacctgcagacgagggtgaggcagctggagtcctgtgagtgccaccctgcatctccccagtgctgggggctggggcgtgcctggcccgagggggcacgctgggagcctgacgcctgcacagcctgcgtctgccaggatggggccgctcactgtggcccccaagcacacctgccccattgcaggggctgcagccaaaatggccagacctacggcaacggggagaccttctccccagatgcctgcaccacctgccgctgtctggaaggtaccatcacttgcaaccagaagccatgcccaagaggaccctgccctgagccaggagcatgctgcccgcactgtaagccaggctgtgattatgaggggcagctttatgaggagggggtcaccttcctgtccagctccaacccttgtctacagtgcacctgcctgaggagccgagttcgctgcatggccctgaagtgcccgcctagcccctgcccagagccagtgctgaggcctgggcactgctgcccaacctgccaaggctgcacagaaggtggctctcactgggaacatggccaagagtggacaacacctggggacccctgccgaatctgccggtgcctggagggtcacatccagtgccgccagcgagaatgtgccagcctgtgtccatacccagcccggcccctcccaggcacctgctgccctgtgtgtgatggctgtttcctaaacgggcgggagcaccgcagcggggagcctgtgggctcaggggacccctgctcgcactgccgctgtgctaatgggagtgtccagtgtgagcctctgccctgcccgccagtgccctgcagacacccaggcaagatccctgggcagtgctgccctgtctgcgatggctgtgagtaccagggacaccagtatcagagccaggagaccttcagactccaagagcggggcctctgtgtccgctgctcctgccaggctggcgaggtctcctgtgaggagcaggagtgcccagtcaccccctgtgccctgcctgcctctggccgccagctctgcccagcctgtgagctggatggagaggagtttgctgagggagtccagtgggagcctgatggtcggccctgcaccgcctgcgtctgtcaagatggggtacccaagtgcggggctgtgctctgccccccagccccctgccagcaccccacccagccccctggtgcctgctgccccagctgtgacagctgcacctaccacagccaagtgtatgccaatgggcagaacttcacggatgcagacagcccttgccatgcctgccactgtcaggatggaactgtgacatgctccttggttgactgccctcccacgacctgtgccaggccccagagtggaccaggccagtgttgccccaggtgcccagactgcatcctggaggaagaggtgtttgtggacggcgagagcttctcccacccccgagacccctgccaggagtgccgatgccaggaaggccatgcccactgccagcctcgcccctgccccagggccccctgtgcccacccgctgcctgggacctgctgcccgaacgactgcagcggctgtgcctttggcgggaaagagtaccccagcggagcggacttcccccacccctctgacccctgccgtctgtgtcgctgtctgagcggcaacgtgcagtgcctggcccgccgctgcgtgccgctgccctgtccagagcctgtcctgctgccgggagagtgctgcccgcagtgcccagccgccccagcccccgccggctgcccacggcccggcgcggcccacgcccgccaccaggagtacttctccccgcccggcgatccctgccgccgctgcctctgcctcgacggctccgtgtcctgccagcggctgccctgcccgcccgcgccctgcgcgcacccgcgccaggggccttgctgcccctcctgcgacggctgcctgtaccaggggaaggagtttgccagcggggagcgcttcccatcgcccactgctgcctgccacctctgcctttgctgggagggcagcgtgagctgcgagcccaaggcatgtgcccctgcactgtgccccttccctgccaggggcgactgctgccctgactgtgatggctgtgagtacctgggggagtcctacctgagtaaccaggagttcccagacccccgagaaccctgcaacctgtgtacctgtcttggaggcttcgtgacctgcggccgccggccctgtgagcctccgggctgcagccacccactcatcccctctgggcactgctgcccgacctgccagggatgccgctaccatggcgtcactactgcctccggagagacccttcctgacccacttgaccctacctgctccctctgcacctgccagggccgggagcaccaggatggggaggagtttgagggaccagcaggcagctgtgagtggtgtcgctgtcaggctggccaggtcagctgtgtgcggctgcagtgcccaccccttccctgcaagctccaggtcaccgagcgggggagctgctgccctcgctgcagaggctgcctggctcatggggaagagcaccccgaaggcagtagatgggtgccccccgacagtgcctgctcctcctgtgtgtgtcacgagggcgtcgtcacctgtgcacgcatccagtgcatcagctcttgcgcccagccccgccaagggccccatgactgctgtcctcaatgctctgactgtgagcatgagggccggaagtacgagcctggggagagcttccagcctggggcagacccctgtgaagtgtgcatctgcgagccacagcctgaggggcctcccagccttcgctgtcaccggcggcagtgtcccagcctggtgggctgcccccccagccagctcctgccccctgggccccagcactgctgtcccacctgtgccgaggccttgagtaactgttcagagggcctgctgggatctgagctagccccaccagacccctgctacacgtgccagtgccaggacctgacatggctctgcatccaccaggcttgtcctgagctcagctgtcccctctcagagcgccacactccccctgggagctgctgccccgtatgccgggaatgtgtggtggaggccgagggccggagagtggcagatggagagagctggcgggaccccagcaatgcgtgcatcgcctgcacctgccatcggggccatgtggagtgccacctcgaggagtgccaggccctctcctgcccccatggctgggcgaaggtgccccaggctgacagctgctgtgagcgatgccaagctcccacccagtcctgcgtgcaccagggccgtgaggtggcctctggagagcgctggactgtggacacctgcaccagctgctcctgcatggcgggcaccgtgcgttgccagagccagcgctgctcaccgctctcgtgtggccccgacaaggcccctgccctgagtcctggcagctgctgcccccgctgcctgcctcggcccgcttcctgcatggccttcggagacccccattaccgcaccttcgacggccgcctgctgcacttccagggcagttgcagctatgtgctggccaaggactgccacagcggggacttcagtgtgcacgtgaccaatgatgaccggggccggagcggtgtggcctggacccaggaggtggcggtgctgctgggagacatggccgtgcggctgctgcaggacggggcagtcacggtggatgggcacccggtggccttgcccttcctgcaggagccgctgctgtatgtggagctgcgaggacacactgtgatcctgcacgcccagcccgggctccaggtgctgtgggatgggcagtcccaggtggaggtgagcgtacctggctcctaccagggccggacttgtgggctctgtgggaacttcaatggctttgcccaggacgatctgcagggccctgaggggctgctcctgccctcggaggctgcgtttgggaatagctggcaggtctcagaggggctgtggcctggccggccctgttctgcaggccgagaggtggatccgtgccgggcagcaggttaccgtgccaggcgtgaggccaatgcccggtgtggggtgctgaagtcctccccattcagtcgctgccatgctgtggtgccaccggagcccttctttgccgcctgtgtgtatgacctgtgtgcctgtggccctggctcctccgctgatgcctgcctctgtgatgccctggaagcctacgccagtcactgtcgccaggcaggagtgacacctacctggcgaggccccacgctgtgtgtggtaggctgccccctggagcgtggcttcgtgtttgatgagtgcggcccaccctgtccccgcacctgcttcaatcagcatatccccctgggggagctggcagcccactgcgtgaggccctgcgtgcccggctgccagtgccctgcaggcctggtggagcatgaggcccactgcatcccacccgaggcctgcccccaagtcctgctcactggagaccagccacttggtgctcggcccagccccagccgggagccccaggagacaccc

SEQ ID NO: 107 - protein, 1593 aa, Homo sapiens
MAGVGAAALSLLLHLGALALAAGAEGGAVPREPPGQQTTAHSSVLAGNSQEQWHPLREWLGRLEAAVMELREQNKDLQTRVRQLESCECHPASPQCWGLGRAWPEGARWEPDACTACVCQDGAAHCGPQAHLPHCRGCSQNGQTYGNGETFSPDACTTCRCLEGTITCNQKPCPRGPCPEPGACCPHCKPGCDYEGQLYEEGVTFLSSSNPCLQCTCLRSRVRCMALKCPPSPCPEPVLRPGHCCPTCQGCTEGGSHWEHGQEWTTPGDPCRICRCLEGHIQCRQRECASLCPYPARPLPGTCCPVCDGCFLNGREHRSGEPVGSGDPCSHCRCANGSVQCEPLPCPPVPCRHPGKIPGQCCPVCDGCEYQGHQYQSQETFRLQERGLCVRCSCQAGEVSCEEQECPVTPCALPASGRQLCPACELDGEEFAEGVQWEPDGRPCTACVCQDGVPKCGAVLCPPAPCQHPTQPPGACCPSCDSCTYHSQVYANGQNFTDADSPCHACHCQDGTVTCSLVDCPPTTCARPQSGPGQCCPRCPDCILEEEVFVDGESFSHPRDPCQECRCQEGHAHCQPRPCPRAPCAHPLPGTCCPNDCSGCAFGGKEYPSGADFPHPSDPCRLCRCLSGNVQCLARRCVPLPCPEPVLLPGECCPQCPAAPAPAGCPRPGAAHARHQEYFSPPGDPCRRCLCLDGSVSCQRLPCPPAPCAHPRQGPCCPSCDGCLYQGKEFASGERFPSPTAACHLCLCWEGSVSCEPKACAPALCPFPARGDCCPDCDGCEYLGESYLSNQEFPDPREPCNLCTCLGGFVTCGRRPCEPPGCSHPLIPSGHCCPTCQGCRYHGVTTASGETLPDPLDPTCSLCTCQGREHQDGEEFEGPAGSCEWCRCQAGQVSCVRLQCPPLPCKLQVTERGSCCPRCRGCLAHGEEHPEGSRWVPPDSACSSCVCHEGVVTCARIQCISSCAQPRQGPHDCCPQCSDCEHEGRKYEPGESFQPGADPCEVCICEPQPEGPPSLRCHRRQCPSLVGCPPSQLLPPGPQHCCPTCAEALSNCSEGLLGSELAPPDPCYTCQCQDLTWLCIHQACPELSCPLSERHTPPGSCCPVCRECVVEAEGRRVADGESWRDPSNACIACTCHRGHVECHLEECQALSCPHGWAKVPQADSCCERCQAPTQSCVHQGREVASGERWTVDTCTSCSCMAGTVRCQSQRCSPLSCGPDKAPALSPGSCCPRCLPRPASCMAFGDPHYRTFDGRLLHFQGSCSYVLAKDCHSGDFSVHVTNDDRGRSGVAWTQEVAVLLGDMAVRLLQDGAVTVDGHPVALPFLQEPLLYVELRGHTVILHAQPGLQVLWDGQSQVEVSVPGSYQGRTCGLCGNFNGFAQDDLQGPEGLLLPSEAAFGNSWQVSEGLWPGRPCSAGREVDPCRAAGYRARREANARCGVLKSSPFSRCHAVVPPEPFFAACVYDLCACGPGSSADACLCDALEAYASHCRQAGVTPTWRGPTLCVVGCPLERGFVFDECGPPCPRTCFNQHIPLGELAAHCVRPCVPGCQCPAGLVEHEAHCIPPEACPQVLLTGDQPLGARPSPSREPQETP

SEQ ID NO: 108 - DNA, 3173 bp, Homo sapiens
  CDS (1)...(3173)
atgcccactgccagcctcgcccctgccccagggccccctgtgcccacccgctgcctgggacctgctgcccgaacgactgcagcggctgtgcctttggcgggaaagagtaccccagcggagcggacttcccccacccctctgacccctgccgtctgtgtcgctgtctgagcggcaacgtgcagtgcctggcccgccgctgcgtgccgctgccctgtccagagcctgtcctgctgccgggagagtgctgcccgcagtgcccagccgccccagcccccgccggctgcccacggcccggcgcggcccacgcccgccaccaggagtacttctccccgcccggcgatccctgccgccgctgcctctgcctcgacggctccgtgtcctgccagcggctgccctgcccgcccgcgccctgcgcgcacccgcgccaggggccttgctgcccctcctgcgacggctgcctgtaccaggggaaggagtttgccagcggggagcgcttcccatcgcccactgctgcctgccacctctgcctttgctgggagggcagcgtgagctgcgagcccaaggcatgtgcccctgcactgtgccccttccctgccaggggcgactgctgccctgactgtgatggctgtgagtacctgggggagtcctacctgagtaaccaggagttcccagacccccgagaaccctgcaacctgtgtacctgtcttggaggcttcgtgacctgcggccgccggccctgtgagcctccgggctgcagccacccactcatcccctctgggcactgctgcccgacctgccagggatgccgctaccatggcgtcactactgcctccggagagacccttcctgacccacttgaccctacctgctccctctgcacctgccaggaaggttccatgcgctgccaaaagaagccatgtgccccagctctctgcccccacccctctccaggcccctgcttctgccctgtttgccacagttgtctctctcagggccgggagcaccaggatggggaggagtttgagggaccagcaggcagctgtgagtggtgtcgctgtcaggctggccaggtcagctgtgtgcggctgcagtgcccaccccttccctgcaagctccaggtcaccgagcgggggagctgctgccctcgctgcagaggctgcctggctcatggggaagagcaccccgaaggcagtagatgggtgccccccgacagtgcctgctcctcctgtgtgtgtcacgagggcgtcgtcacctgtgcacgcatccagtgcatcagctcttgcgcccagccccgccaagggccccatgactgctgtcctcaatgctctgactgtgagcatgagggccggaagtacgagcctggggagagcttccagcctggggcagacccctgtgaagtgtgcatctgcgagccacagcctgaggggcctcccagccttcgctgtcaccggcggcagtgtcccagcctggtgggctgcccccccagccagctcctgccccctgggccccagcactgctgtcccacctgtgccgaggccttgagtaactgttcagagggcctgctgggatctgagctagccccaccagacccctgctacacgtgccagtgccaggacctgacatggctctgcatccaccaggcttgtcctgagctcagctgtcccctctcagagcgccacactccccctgggagctgctgccccgtatgccgggaatgtgtggtggaggccgagggccggagagtggcagatggagagagctggcgggaccccagcaatgcgtgcatcgcctgcacctgccatcggggccatgtggagtgccacctcgaggagtgccaggccctctcctgcccccatggctgggcgaaggtgccccaggctgacagctgctgtgagcgatgccaagctcccacccagtcctgcgtgcaccagggccgtgaggtggcctctggagagcgctggactgtggacacctgcaccagctgctcctgcatggcgggcaccgtgcgttgccagagccagcgctgctcaccgctctcgtgtggccccgacaaggcccctgccctgagtcctggcagctgctgcccccgctgcctgcctcggcccgcttcctgcatggccttcggagacccccattaccgcaccttcgacggccgcctgctgcacttccagggcagttgcagctatgtgctggccaaggactgccacagcggggacttcagtgtgcacgtgaccaatgatgaccggggccggagcggtgtggcctggacccaggaggtggcggtgctgctgggagacatggccgtgcggctgctgcaggacggggcagtcacggtggatgggcacccggtggccttgcccttcctgcaggagccgctgctgtatgtggagctgcgaggacacactgtgatcctgcacgcccagcccgggctccaggtgctgtgggatgggcagtcccaggtggaggtgagcgtacctggctcctaccagggccggacttgtgggctctgtgggaacttcaatggctttgcccaggacgatctgcagggccctgaggggctgctcctgccctcggaggctgcgtttgggaatagctggcaggtctcagaggggctgtggcctggccggccctgttctgcaggccgagaggtggatccgtgccgggcagcaggttaccgtgccaggcgtgaggccaatgcccggtgtggggtgctgaagtcctccccattcagtcgctgccatgctgtggtgccaccggagcccttctttgccgcctgtgtgtatgacctgtgtgcctgtggccctggctcctccgctgatgcctgcctctgtgatgccctggaagcctacgccagtcactgtcgccaggcaggagtgacacctacctggcgaggccccacgctgtgtgtggtaggctgccccctggagcgtggcttcgtgtttgatgagtgcggcccaccctgtccccgcacctgcttcaatcagcatatccccctgggggagctggcagcccactgcgtgaggccctgcgtgcccggctgccagtgccctgcaggcctggtggagcatgaggcccactgcatcccacccgaggcctgcccccaagtcctgctcactggagaccagccacttggtgctcggcccagccccagccgggagccccaggagacaccc

SEQ ID NO: 109 - protein, 1042 aa, Homo sapiens
MPTASLAPAPGPPVPTRCLGPAARTTAAAVPLAGKSTPAERTSPTPLTPAVCVAVAATCSAWPAAACRCPVQSLSCCRESAARSAQPPQPPPAAHGPARPTPATRSTSPRPAIPAAAASASTAPCPASGCPARPRPARTRARGLAAPPATAACTRGRSLPAGSASHRPLLPATSAFAGRAAAASPRHVPLHCAPSLPGATAALTVMAVSTWGSPTVTRSSQTPENPATCVPVLEASPAAAGPVSLRAAATHSSPLGTAARPARDAATMASLLPPERPFLTHLTLPAPSAPARKVPCAAKRSHVPQLSAPTPLQAPASALFATVVSLRAGSTRMGRSLRDQQAAVSGVAVRLARSAVCGCSAHPFPASSRSPSGGAAALAAEAAWLMGKSTPKAVDGCPPTVPAPPVCVTRASSPVHASSASALAPSPAKGPMTAVLNALTVSMRAGSTSLGRASSLGQTPVKCASASHSLRGLPAFAVTGGSVPAWWAAPPASSCPLGPSTAVPPVPRPVTVQRACWDLSPHQTPATRASARTHGSASTRLVLSSAVPSQSATLPLGAAAPYAGNVWWRPRAGEWQMERAGGTPAMRASPAPAIGAMWSATSRSARPSPAPMAGRRCPRLTAAVSDAKLPPSPACTRAVRWPLESAGLWTPAPAAPAWRAPCVARASAAHRSRVAPTRPLPVLAAAAPAACLGPLPAWPSETPITAPSTAACCTSRAVAAMCWPRTATAGTSVCTPMMTGAGAVWPGPRRWRCCWETWPCGCCRTGQSRWMGTRWPCPSCRSRCCMWSCEDTLSCTPSPGSRCCGMGSPRWRAYLAPTRAGLVGSVGTSMALPRTICRALRGCSCPRRLRLGIAGRSQRGCGLAGPVLQAERWIRAGQQVTVPGVRPMPGVGCSPPHSVAAMLWCHRSPSLPPVCMTCVPVALAPPLMPASVMPWKPTPVTVARQEHLPGEAPRCVWAAPWSVASCLMSAAHPVPAPASISISPWGSWQPTAGPACPAASALQAWWSMRPTASHPRPAPKSCSLETSHLVLGPAPAGSPRRH

SEQ ID NO: 110 - DNA, 4431 bp, Homo sapiens
  CDS (1)...(4431)
atggccggggtcggggccgctgcgctgtcccttctcctgcacctcggggccctggcgctggccgcgggcgcggaaggtggggctgtccccagggagccccctgggcagcagacaactgcccattcctcagtccttgctgggaactcccaggagcagtggcaccccctgcgagagtggctggggcgactggaggctgcagtgatggagctcagagaacagaataaggacctgcagacgagggtgaggcagctggagtcctgtgagtgccaccctgcatctccccagtgctgggggctggggcgtgcctggcccgagggggcacgctgggagcctgacgcctgcacagcctgcgtctgccaggatggggccgctcactgtggcccccaagcacacctgcccggctgcacagaaggtggctctcactgggaacatggccaagagtggacaacacctggggacccctgccgaatctgccggtgcctggagggtcacatccagtgccgccagcgagaatgtgccagcctgtgtccatacccagcccggcccctcccaggcacctgctgccctgtgtgtgatggctgtttcctaaacgggcgggagcaccgcagcggggagcctgtgggctcaggggacccctgctcgcactgccgctgtgctaatgggagtgtccagtgtgagcctctgccctgcccgccagtgccctgcagacacccaggcaagatccctgggcagtgctgccctgtctgcgatggctgtgagtaccagggacaccagtatcagagccaggagaccttcagactccaagagcggggcctctgtgtccgctgctcctgccaggctggcgaggtctcctgtgaggagcaggagtgcccagtcaccccctgtgccctgcctgcctctggccgccagctctgcccagcctgtgagctggatggagaggagtttgctgagggagtccagtgggagcctgatggtcggccctgcaccgcctgcgtctgtcaagatggggtacccaagtgcggggctgtgctctgccccccagccccctgccagcaccccacccagccccctggtgcctgctgccccagctgtgacagctgcacctaccacagccaagtgtatgccaatgggcagaacttcacggatgcagacagcccttgccatgcctgccactgtcaggatggaactgtgacatgctccttggttgactgccctcccacgacctgtgccaggccccagagtggaccaggccagtgttgccccaggtgcccagactgcatcctggaggaagaggtgtttgtggacggcgagagcttctcccacccccgagacccctgccaggagtgccgatgccaggaaggccatgcccactgccagcctcgcccctgccccagggccccctgtgcccacccgctgcctgggacctgctgcccgaacgactgcagcggctgtgcctttggcgggaaagagtaccccagcggagcggacttcccccacccctctgacccctgccgtctgtgtcgctgtctgagcggcaacgtgcagtgcctggcccgccgctgcgtgccgctgccctgtccagagcctgtcctgctgccgggagagtgctgcccgcagtgcccagccgccccagcccccgccggctgcccacggcccggcgcggcccacgcccgccaccaggagtacttctccccgcccggcgatccctgccgccgctgcctctgcctcgacggctccgtgtcctgccagcggctgccctgcccgcccgcgccctgcgcgcacccgcgccaggggccttgctgcccctcctgcgacggctgcctgtaccaggggaaggagtttgccagcggggagcgcttcccatcgcccactgctgcctgccacctctgcctttgctgggagggcagcgtgagctgcgagcccaaggcatgtgcccctgcactgtgccccttccctgccaggggcgactgctgccctgactgtgatggctgtgagtacctgggggagtcctacctgagtaaccaggagttcccagacccccgagaaccctgcaacctgtgtacctgtcttggaggcttcgtgacctgcggccgccggccctgtgagcctccgggctgcagccacccactcatcccctctgggcactgctgcccgacctgccagggatgccgctaccatggcgtcactactgcctccggagagacccttcctgacccacttgaccctacctgctccctctgcacctgccagggccgggagcaccaggatggggaggagtttgagggaccagcaggcagctgtgagtggtgtcgctgtcaggctggccaggtcagctgtgtgcggctgcagtgcccaccccttccctgcaagctccaggtcaccgagcgggggagctgctgccctcgctgcagaggctgcctggctcatggggaagagcaccccgaaggcagtagatgggtgccccccgacagtgcctgctcctcctgtgtgtgtcacgagggcgtcgtcacctgtgcacgcatccagtgcatcagctcttgcgcccagccccgccaagggccccatgactgctgtcctcaatgctctgactgtgagcatgagggccggaagtacgagcctggggagagcttccagcctggggcagacccctgtgaagtgtgcatctgcgagccacagcctgaggggcctcccagccttcgctgtcaccggcggcagtgtcccagcctggtgggctgcccccccagccagctcctgccccctgggccccagcactgctgtcccacctgtgccgaggccttgagtaactgttcagagggcctgctgggatctgagctagccccaccagacccctgctacacgtgccagtgccaggacctgacatggctctgcatccaccaggcttgtcctgagctcagctgtcccctctcagagcgccacactccccctgggagctgctgccccgtatgccgggaatgtgtggtggaggccgagggccggagagtggcagatggagagagctggcgggaccccagcaatgcgtgcatcgcctgcacctgccatcggggccatgtggagtgccacctcgaggagtgccaggccctctcctgcccccatggctgggcgaaggtgccccaggctgacagctgctgtgagcgatgccaagctcccacccagtcctgcgtgcaccagggccgtgaggtggcctctggagagcgctggactgtggacacctgcaccagctgctcctgcatggcgggcaccgtgcgttgccagagccagcgctgctcaccgctctcgtgtggccccgacaaggcccctgccctgagtcctggcagctgctgcccccgctgcctgcctcggcccgcttcctgcatggccttcggagacccccattaccgcaccttcgacggccgcctgctgcacttccagggcagttgcagctatgtgctggccaaggactgccacagcggggacttcagtgtgcacgtgaccaatgatgaccggggccggagcggtgtggcctggacccaggaggtggcggtgctgctgggagacatggccgtgcggctgctgcaggacggggcagtcacggtggatgggcacccggtggccttgcccttcctgcaggagccgctgctgtatgtggagctgcgaggacacactgtgatcctgcacgcccagcccgggctccaggtgctgtgggatgggcagtcccaggtggaggtgagcgtacctggctcctaccagggccggacttgtgggctctgtgggaacttcaatggctttgcccaggacgatctgcagggccctgaggggctgctcctgccctcggaggctgcgtttgggaatagctggcaggtctcagaggggctgtggcctggccggccctgttctgcaggccgagaggtggatccgtgccgggcagcaggttaccgtgccaggcgtgaggccaatgcccggtgtggggtgctgaagtcctccccattcagtcgctgccatgctgtggtgccaccggagcccttctttgccgcctgtgtgtatgacctgtgtgcctgtggccctggctcctccgctgatgcctgcctctgtgatgccctggaagcctacgccagtcactgtcgccaggcaggagtgacacctacctggcgaggccccacgctgtgtgtggtaggctgccccctggagcgtggcttcgtgtttgatgagtgcggcccaccctgtccccgcacctgcttcaatcagcatatccccctgggggagctggcagcccactgcgtgaggccctgcgtgcccggctgccagtgccctgcaggcctggtggagcatgaggcccactgcatcccacccgaggcctgcccccaagtcctgctcactggagaccagccacttggtgctcggcccagccccagccgggagccccaggagacaccc

SEQ ID NO: 111 - protein, 1477 aa, Homo sapiens
MAGVGAAALSLLLHLGALALAAGAEGGAVPREPPGQQTTAHSSVLAGNSQEQWHPLREWLGRLEAAVMELREQNKDLQTRVRQLESCECHPASPQCWGLGRAWPEGARWEPDACTACVCQDGAAHCGPQAHLPGCTEGGSHWEHGQEWTTPGDPCRICRCLEGHIQCRQRECASLCPYPARPLPGTCCPVCDGCFLNGREHRSGEPVGSGDPCSHCRCANGSVQCEPLPCPPVPCRHPGKIPGQCCPVCDGCEYQGHQYQSQETFRLQERGLCVRCSCQAGEVSCEEQECPVTPCALPASGRQLCPACELDGEEFAEGVQWEPDGRPCTACVCQDGVPKCGAVLCPPAPCQHPTQPPGACCPSCDSCTYHSQVYANGQNFTDADSPCHACHCQDGTVTCSLVDCPPTTCARPQSGPGQCCPRCPDCILEEEVFVDGESFSHPRDPCQECRCQEGHAHCQPRPCPRAPCAHPLPGTCCPNDCSGCAFGGKEYPSGADFPHPSDPCRLCRCLSGNVQCLARRCVPLPCPEPVLLPGECCPQCPAAPAPAGCPRPGAAHARHQEYFSPPGDPCRRCLCLDGSVSCQRLPCPPAPCAHPRQGPCCPSCDGCLYQGKEFASGERFPSPTAACHLCLCWEGSVSCEPKACAPALCPFPARGDCCPDCDGCEYLGESYLSNQEFPDPREPCNLCTCLGGFVTCGRRPCEPPGCSHPLIPSGHCCPTCQGCRYHGVTTASGETLPDPLDPTCSLCTCQGREHQDGEEFEGPAGSCEWCRCQAGQVSCVRLQCPPLPCKLQVTERGSCCPRCRGCLAHGEEHPEGSRWVPPDSACSSCVCHEGVVTCARIQCISSCAQPRQGPHDCCPQCSDCEHEGRKYEPGESFQPGADPCEVCICEPQPEGPPSLRCHRRQCPSLVGCPPSQLLPPGPQHCCPTCAEALSNCSEGLLGSELAPPDPCYTCQCQDLTWLCIHQACPELSCPLSERHTPPGSCCPVCRECVVEAEGRRVADGESWRDPSNACIACTCHRGHVECHLEECQALSCPHGWAKVPQADSCCERCQAPTQSCVHQGREVASGERWTVDTCTSCSCMAGTVRCQSQRCSPLSCGPDKAPALSPGSCCPRCLPRPASCMAFGDPHYRTFDGRLLHFQGSCSYVLAKDCHSGDFSVHVTNDDRGRSGVAWTQEVAVLLGDMAVRLLQDGAVTVDGHPVALPFLQEPLLYVELRGHTVILHAQPGLQVLWDGQSQVEVSVPGSYQGRTCGLCGNFNGFAQDDLQGPEGLLLPSEAAFGNSWQVSEGLWPGRPCSAGREVDPCRAAGYRARREANARCGVLKSSPFSRCHAVVPPEPFFAACVYDLCACGPGSSADACLCDALEAYASHCRQAGVTPTWRGPTLCVVGCPLERGFVFDECGPPCPRTCFNQHIPLGELAAHCVRPCVPGCQCPAGLVEHEAHCIPPEACPQVLLTGDQPLGARPSPSREPQETP

SEQ ID NO: 112 - DNA, 4536 bp, Homo sapiens
  CDS (1)...(4536)
atggccggggtcggggccgctgcgctgtcccttctcctgcacctcggggccctggcgctggccgcgggcgcggaaggtggggctgtccccagggagccccctgggcagcagacaactgcccattcctcagtccttgctgggaactcccaggagcagtggcaccccctgcgagagtggctggggcgactggaggctgcagtgatggagctcagagaacagaataaggacctgcagacgagggtgaggcagctggagtcctgtgagtgccaccctgcatctccccagtgctgggggctggggcgtgcctggcccgagggggcacgctgggagcctgacgcctgcacagcctgcgtctgccaggatggggccgctcactgtggcccccaagcacacctgcccggctgcacagaaggtggctctcactgggaacatggccaagagtggacaacacctggggacccctgccgaatctgccggtgcctggagggtcacatccagtgccgccagcgagaatgtgccagcctgtgtccatacccagcccggcccctcccaggcacctgctgccctgtgtgtgatggctgtttcctaaacgggcgggagcaccgcagcggggagcctgtgggctcaggggacccctgctcgcactgccgctgtgctaatgggagtgtccagtgtgagcctctgccctgcccgccagtgccctgcagacacccaggcaagatccctgggcagtgctgccctgtctgcgatggctgtgagtaccagggacaccagtatcagagccaggagaccttcagactccaagagcggggcctctgtgtccgctgctcctgccaggctggcgaggtctcctgtgaggagcaggagtgcccagtcaccccctgtgccctgcctgcctctggccgccagctctgcccagcctgtgagctggatggagaggagtttgctgagggagtccagtgggagcctgatggtcggccctgcaccgcctgcgtctgtcaagatggggtacccaagtgcggggctgtgctctgccccccagccccctgccagcaccccacccagccccctggtgcctgctgccccagctgtgacagctgcacctaccacagccaagtgtatgccaatgggcagaacttcacggatgcagacagcccttgccatgcctgccactgtcaggatggaactgtgacatgctccttggttgactgccctcccacgacctgtgccaggccccagagtggaccaggccagtgttgccccaggtgcccagactgcatcctggaggaagaggtgtttgtggacggcgagagcttctcccacccccgagacccctgccaggagtgccgatgccaggaaggccatgcccactgccagcctcgcccctgccccagggccccctgtgcccacccgctgcctgggacctgctgcccgaacgactgcagcggctgtgcctttggcgggaaagagtaccccagcggagcggacttcccccacccctctgacccctgccgtctgtgtcgctgtctgagcggcaacgtgcagtgcctggcccgccgctgcgtgccgctgccctgtccagagcctgtcctgctgccgggagagtgctgcccgcagtgcccagccgccccagcccccgccggctgcccacggcccggcgcggcccacgcccgccaccaggagtacttctccccgcccggcgatccctgccgccgctgcctctgcctcgacggctccgtgtcctgccagcggctgccctgcccgcccgcgccctgcgcgcacccgcgccaggggccttgctgcccctcctgcgacggctgcctgtaccaggggaaggagtttgccagcggggagcgcttcccatcgcccactgctgcctgccacctctgcctttgctgggagggcagcgtgagctgcgagcccaaggcatgtgcccctgcactgtgccccttccctgccaggggcgactgctgccctgactgtgatggctgtgagtacctgggggagtcctacctgagtaaccaggagttcccagacccccgagaaccctgcaacctgtgtacctgtcttggaggcttcgtgacctgcggccgccggccctgtgagcctccgggctgcagccacccactcatcccctctgggcactgctgcccgacctgccagggatgccgctaccatggcgtcactactgcctccggagagacccttcctgacccacttgaccctacctgctccctctgcacctgccaggaaggttccatgcgctgccaaaagaagccatgtgccccagctctctgcccccacccctctccaggcccctgcttctgccctgtttgccacagttgtctctctcagggccgggagcaccaggatggggaggagtttgagggaccagcaggcagctgtgagtggtgtcgctgtcaggctggccaggtcagctgtgtgcggctgcagtgcccaccccttccctgcaagctccaggtcaccgagcgggggagctgctgccctcgctgcagaggctgcctggctcatggggaagagcaccccgaaggcagtagatgggtgccccccgacagtgcctgctcctcctgtgtgtgtcacgagggcgtcgtcacctgtgcacgcatccagtgcatcagctcttgcgcccagccccgccaagggccccatgactgctgtcctcaatgctctgactgtgagcatgagggccggaagtacgagcctggggagagcttccagcctggggcagacccctgtgaagtgtgcatctgcgagccacagcctgaggggcctcccagccttcgctgtcaccggcggcagtgtcccagcctggtgggctgcccccccagccagctcctgccccctgggccccagcactgctgtcccacctgtgccgaggccttgagtaactgttcagagggcctgctgggatctgagctagccccaccagacccctgctacacgtgccagtgccaggacctgacatggctctgcatccaccaggcttgtcctgagctcagctgtcccctctcagagcgccacactccccctgggagctgctgccccgtatgccgggaatgtgtggtggaggccgagggccggagagtggcagatggagagagctggcgggaccccagcaatgcgtgcatcgcctgcacctgccatcggggccatgtggagtgccacctcgaggagtgccaggccctctcctgcccccatggctgggcgaaggtgccccaggctgacagctgctgtgagcgatgccaagctcccacccagtcctgcgtgcaccagggccgtgaggtggcctctggagagcgctggactgtggacacctgcaccagctgctcctgcatggcgggcaccgtgcgttgccagagccagcgctgctcaccgctctcgtgtggccccgacaaggcccctgccctgagtcctggcagctgctgcccccgctgcctgcctcggcccgcttcctgcatggccttcggagacccccattaccgcaccttcgacggccgcctgctgcacttccagggcagttgcagctatgtgctggccaaggactgccacagcggggacttcagtgtgcacgtgaccaatgatgaccggggccggagcggtgtggcctggacccaggaggtggcggtgctgctgggagacatggccgtgcggctgctgcaggacggggcagtcacggtggatgggcacccggtggccttgcccttcctgcaggagccgctgctgtatgtggagctgcgaggacacactgtgatcctgcacgcccagcccgggctccaggtgctgtgggatgggcagtcccaggtggaggtgagcgtacctggctcctaccagggccggacttgtgggctctgtgggaacttcaatggctttgcccaggacgatctgcagggccctgaggggctgctcctgccctcggaggctgcgtttgggaatagctggcaggtctcagaggggctgtggcctggccggccctgttctgcaggccgagaggtggatccgtgccgggcagcaggttaccgtgccaggcgtgaggccaatgcccggtgtggggtgctgaagtcctccccattcagtcgctgccatgctgtggtgccaccggagcccttctttgccgcctgtgtgtatgacctgtgtgcctgtggccctggctcctccgctgatgcctgcctctgtgatgccctggaagcctacgccagtcactgtcgccaggcaggagtgacacctacctggcgaggccccacgctgtgtgtggtaggctgccccctggagcgtggcttcgtgtttgatgagtgcggcccaccctgtccccgcacctgcttcaatcagcatatccccctgggggagctggcagcccactgcgtgaggccctgcgtgcccggctgccagtgccctgcaggcctggtggagcatgaggcccactgcatcccacccgaggcctgcccccaagtcctgctcactggagaccagccacttggtgctcggcccagccccagccgggagccccaggagacaccc

SEQ ID NO: 113 - protein, 1512 aa, Homo sapiens
MAGVGAAALSLLLHLGALALAAGAEGGAVPREPPGQQTTAHSSVLAGNSQEQWHPLREWLGRLEAAVMELREQNKDLQTRVRQLESCECHPASPQCWGLGRAWPEGARWEPDACTACVCQDGAAHCGPQAHLPGCTEGGSHWEHGQEWTTPGDPCRICRCLEGHIQCRQRECASLCPYPARPLPGTCCPVCDGCFLNGREHRSGEPVGSGDPCSHCRCANGSVQCEPLPCPPVPCRHPGKIPGQCCPVCDGCEYQGHQYQSQETFRLQERGLCVRCSCQAGEVSCEEQECPVTPCALPASGRQLCPACELDGEEFAEGVQWEPDGRPCTACVCQDGVPKCGAVLCPPAPCQHPTQPPGACCPSCDSCTYHSQVYANGQNFTDADSPCHACHCQDGTVTCSLVDCPPTTCARPQSGPGQCCPRCPDCILEEEVFVDGESFSHPRDPCQECRCQEGHAHCQPRPCPRAPCAHPLPGTCCPNDCSGCAFGGKEYPSGADFPHPSDPCRLCRCLSGNVQCLARRCVPLPCPEPVLLPGECCPQCPAAPAPAGCPRPGAAHARHQEYFSPPGDPCRRCLCLDGSVSCQRLPCPPAPCAHPRQGPCCPSCDGCLYQGKEFASGERFPSPTAACHLCLCWEGSVSCEPKACAPALCPFPARGDCCPDCDGCEYLGESYLSNQEFPDPREPCNLCTCLGGFVTCGRRPCEPPGCSHPLIPSGHCCPTCQGCRYHGVTTASGETLPDPLDPTCSLCTCQEGSMRCQKKPCAPALCPHPSPGPCFCPVCHSCLSQGREHQDGEEFEGPAGSCEWCRCQAGQVSCVRLQCPPLPCKLQVTERGSCCPRCRGCLAHGEEHPEGSRWVPPDSACSSCVCHEGVVTCARIQCISSCAQPRQGPHDCCPQCSDCEHEGRKYEPGESFQPGADPCEVCICEPQPEGPPSLRCHRRQCPSLVGCPPSQLLPPGPQHCCPTCAEALSNCSEGLLGSELAPPDPCYTCQCQDLTWLCIHQACPELSCPLSERHTPPGSCCPVCRECVVEAEGRRVADGESWRDPSNACIACTCHRGHVECHLEECQALSCPHGWAKVPQADSCCERCQAPTQSCVHQGREVASGERWTVDTCTSCSCMAGTVRCQSQRCSPLSCGPDKAPALSPGSCCPRCLPRPASCMAFGDPHYRTFDGRLLHFQGSCSYVLAKDCHSGDFSVHVTNDDRGRSGVAWTQEVAVLLGDMAVRLLQDGAVTVDGHPVALPFLQEPLLYVELRGHTVILHAQPGLQVLWDGQSQVEVSVPGSYQGRTCGLCGNFNGFAQDDLQGPEGLLLPSEAAFGNSWQVSEGLWPGRPCSAGREVDPCRAAGYRARREANARCGVLKSSPFSRCHAVVPPEPFFAACVYDLCACGPGSSADACLCDALEAYASHCRQAGVTPTWRGPTLCVVGCPLERGFVFDECGPPCPRTCFNQHIPLGELAAHCVRPCVPGCQCPAGLVEHEAHCIPPEACPQVLLTGDQPLGARPSPSREPQETP

SEQ ID NO: 114 - DNA, 4710 bp, Homo sapiens
  CDS (1)...(4710)
atggagctcagagaacagaataaggacctgcagacgagggtgaggcagctggagtcctgtgagtgccaccctgcatctccccagtgctgggggctggggcgtgcctggcccgagggggcacgctgggagcctgacgcctgcacagcctgcgtctgccaggatggggccgctcactgtggcccccaagcacacctgccccattgcaggggctgcagccaaaatggccagacctacggcaacggggagaccttctccccagatgcctgcaccacctgccgctgtctggaaggtaccatcacttgcaaccagaagccatgcccaagaggaccctgccctgagccaggagcatgctgcccgcactgtaagccaggctgtgattatgaggggcagctttatgaggagggggtcaccttcctgtccagctccaacccttgtctacagtgcacctgcctgaggagccgagttcgctgcatggccctgaagtgcccgcctagcccctgcccagagccagtgctgaggcctgggcactgctgcccaacctgccaaggctgcacagaaggtggctctcactgggaacatggccaagagtggacaacacctggggacccctgccgaatctgccggtgcctggagggtcacatccagtgccgccagcgagaatgtgccagcctgtgtccatacccagcccggcccctcccaggcacctgctgccctgtgtgtgatggctgtttcctaaacgggcgggagcaccgcagcggggagcctgtgggctcaggggacccctgctcgcactgccgctgtgctaatgggagtgtccagtgtgagcctctgccctgcccgccagtgccctgcagacacccaggcaagatccctgggcagtgctgccctgtctgcgatggctgtgagtaccagggacaccagtatcagagccaggagaccttcagactccaagagcggggcctctgtgtccgctgctcctgccaggctggcgaggtctcctgtgaggagcaggagtgcccagtcaccccctgtgccctgcctgcctctggccgccagctctgcccagctcaccctgaccagcctgccccacccacctgtgagctggatggagaggagtttgctgagggagtccagtgggagcctgatggtcggccctgcaccgcctgcgtctgtcaagatggggtacccaagtgcggggctgtgctctgccccccagccccctgccagcaccccacccagccccctggtgcctgctgccccagctgtgacagctgcacctaccacagccaagtgtatgccaatgggcagaacttcacggatgcagacagcccttgccatgcctgccactgtcaggatggaactgtgacatgctccttggttgactgccctcccacgacctgtgccaggccccagagtggaccaggccagtgttgccccaggtgcccagactgcatcctggaggaagaggtgtttgtggacggcgagagcttctcccacccccgagacccctgccaggagtgccgatgccaggaaggccatgcccactgccagcctcgcccctgccccagggccccctgtgcccacccgctgcctgggacctgctgcccgaacgactgcagcggctgtgcctttggcgggaaagagtaccccagcggagcggacttcccccacccctctgacccctgccgtctgtgtcgctgtctgagcggcaacgtgcagtgcctggcccgccgctgcgtgccgctgccctgtccagagcctgtcctgctgccgggagagtgctgcccgcagtgcccagccgccccagcccccgccggctgcccacggcccggcgcggcccacgcccgccaccaggagtacttctccccgcccggcgatccctgccgccgctgcctctgcctcgacggctccgtgtcctgccagcggctgccctgcccgcccgcgccctgcgcgcacccgcgccaggggccttgctgcccctcctgcgacggctgcctgtaccaggggaaggagtttgccagcggggagcgcttcccatcgcccactgctgcctgccacctctgcctttgctgggagggcagcgtgagctgcgagcccaaggcatgtgcccctgcactgtgccccttccctgccaggggcgactgctgccctgactgtgatggctgtgagtacctgggggagtcctacctgagtaaccaggagttcccagacccccgagaaccctgcaacctgtgtacctgtcttggaggcttcgtgacctgcggccgccggccctgtgagcctccgggctgcagccacccactcatcccctctgggcactgctgcccgacctgccagggatgccgctaccatggcgtcactactgcctccggagagacccttcctgacccacttgaccctacctgctccctctgcacctgccaggaaggttccatgcgctgccaaaagaagccatgtgccccagctctctgcccccacccctctccaggcccctgcttctgccctgtttgccacagttgtctctctcagggccgggagcaccaggatggggaggagtttgagggaccagcaggcagctgtgagtggtgtcgctgtcaggctggccaggtcagctgtgtgcggctgcagtgcccaccccttccctgcaagctccaggtcaccgagcgggggagctgctgccctcgctgcagaggctgcctggctcatggggaagagcaccccgaaggcagtagatgggtgccccccgacagtgcctgctcctcctgtgtgtgtcacgagggcgtcgtcacctgtgcacgcatccagtgcatcagctcttgcgcccagccccgccaagggccccatgactgctgtcctcaatgctctgactgtgagcatgagggccggaagtacgagcctggggagagcttccagcctggggcagacccctgtgaagtgtgcatctgcgagccacagcctgaggggcctcccagccttcgctgtcaccggcggcagtgtcccagcctggtgggctgcccccccagccagctcctgccccctgggccccagcactgctgtcccacctgtgccgaggccttgagtaactgttcagagggcctgctgggatctgagctagccccaccagacccctgctacacgtgccagtgccaggacctgacatggctctgcatccaccaggcttgtcctgagctcagctgtcccctctcagagcgccacactccccctgggagctgctgccccgtatgccgggaatgtgtggtggaggccgagggccggagagtggcagatggagagagctggcgggaccccagcaatgcgtgcatcgcctgcacctgccatcggggccatgtggagtgccacctcgaggagtgccaggccctctcctgcccccatggctgggcgaaggtgccccaggctgacagctgctgtgagcgatgccaagctcccacccagtcctgcgtgcaccagggccgtgaggtggcctctggagagcgctggactgtggacacctgcaccagctgctcctgcatggcgggcaccgtgcgttgccagagccagcgctgctcaccgctctcgtgtggccccgacaaggcccctgccctgagtcctggcagctgctgcccccgctgcctgcctcggcccgcttcctgcatggccttcggagacccccattaccgcaccttcgacggccgcctgctgcacttccagggcagttgcagctatgtgctggccaaggactgccacagcggggacttcagtgtgcacgtgaccaatgatgaccggggccggagcggtgtggcctggacccaggaggtggcggtgctgctgggagacatggccgtgcggctgctgcaggacggggcagtcacggtggatgggcacccggtggccttgcccttcctgcaggagccgctgctgtatgtggagctgcgaggacacactgtgatcctgcacgcccagcccgggctccaggtgctgtgggatgggcagtcccaggtggaggtgagcgtacctggctcctaccagggccggacttgtgggctctgtgggaacttcaatggctttgcccaggacgatctgcagggccctgaggggctgctcctgccctcggaggctgcgtttgggaatagctggcaggtctcagaggggctgtggcctggccggccctgttctgcaggccgagaggtggatccgtgccgggcagcaggttaccgtgccaggcgtgaggccaatgcccggtgtggggtgctgaagtcctccccattcagtcgctgccatgctgtggtgccaccggagcccttctttgccgcctgtgtgtatgacctgtgtgcctgtggccctggctcctccgctgatgcctgcctctgtgatgccctggaagcctacgccagtcactgtcgccaggcaggagtgacacctacctggcgaggccccacgctgtgtgtggtaggctgccccctggagcgtggcttcgtgtttgatgagtgcggcccaccctgtccccgcacctgcttcaatcagcatatccccctgggggagctggcagcccactgcgtgaggccctgcgtgcccggctgccagtgccctgcaggcctggtggagcatgaggcccactgcatcccacccgaggcctgcccccaagtcctgctcactggagaccagccacttggtgctcggcccagccccagccgggagccccaggagacaccc

SEQ ID NO: 115 - protein, 1570 aa, Homo sapiens
MELREQNKDLQTRVRQLESCECHPASPQCWGLGRAWPEGARWEPDACTACVCQDGAAHCGPQAHLPHCRGCSQNGQTYGNGETFSPDACTTCRCLEGTITCNQKPCPRGPCPEPGACCPHCKPGCDYEGQLYEEGVTFLSSSNPCLQCTCLRSRVRCMALKCPPSPCPEPVLRPGHCCPTCQGCTEGGSHWEHGQEWTTPGDPCRICRCLEGHIQCRQRECASLCPYPARPLPGTCCPVCDGCFLNGREHRSGEPVGSGDPCSHCRCANGSVQCEPLPCPPVPCRHPGKIPGQCCPVCDGCEYQGHQYQSQETFRLQERGLCVRCSCQAGEVSCEEQECPVTPCALPASGRQLCPAHPDQPAPPTCELDGEEFAEGVQWEPDGRPCTACVCQDGVPKCGAVLCPPAPCQHPTQPPGACCPSCDSCTYHSQVYANGQNFTDADSPCHACHCQDGTVTCSLVDCPPTTCARPQSGPGQCCPRCPDCILEEEVFVDGESFSHPRDPCQECRCQEGHAHCQPRPCPRAPCAHPLPGTCCPNDCSGCAFGGKEYPSGADFPHPSDPCRLCRCLSGNVQCLARRCVPLPCPEPVLLPGECCPQCPAAPAPAGCPRPGAAHARHQEYFSPPGDPCRRCLCLDGSVSCQRLPCPPAPCAHPRQGPCCPSCDGCLYQGKEFASGERFPSPTAACHLCLCWEGSVSCEPKACAPALCPFPARGDCCPDCDGCEYLGESYLSNQEFPDPREPCNLCTCLGGFVTCGRRPCEPPGCSHPLIPSGHCCPTCQGCRYHGVTTASGETLPDPLDPTCSLCTCQEGSMRCQKKPCAPALCPHPSPGPCFCPVCHSCLSQGREHQDGEEFEGPAGSCEWCRCQAGQVSCVRLQCPPLPCKLQVTERGSCCPRCRGCLAHGEEHPEGSRWVPPDSACSSCVCHEGVVTCARIQCISSCAQPRQGPHDCCPQCSDCEHEGRKYEPGESFQPGADPCEVCICEPQPEGPPSLRCHRRQCPSLVGCPPSQLLPPGPQHCCPTCAEALSNCSEGLLGSELAPPDPCYTCQCQDLTWLCIHQACPELSCPLSERHTPPGSCCPVCRECVVEAEGRRVADGESWRDPSNACIACTCHRGHVECHLEECQALSCPHGWAKVPQADSCCERCQAPTQSCVHQGREVASGERWTVDTCTSCSCMAGTVRCQSQRCSPLSCGPDKAPALSPGSCCPRCLPRPASCMAFGDPHYRTFDGRLLHFQGSCSYVLAKDCHSGDFSVHVTNDDRGRSGVAWTQEVAVLLGDMAVRLLQDGAVTVDGHPVALPFLQEPLLYVELRGHTVILHAQPGLQVLWDGQSQVEVSVPGSYQGRTCGLCGNFNGFAQDDLQGPEGLLLPSEAAFGNSWQVSEGLWPGRPCSAGREVDPCRAAGYRARREANARCGVLKSSPFSRCHAVVPPEPFFAACVYDLCACGPGSSADACLCDALEAYASHCRQAGVTPTWRGPTLCVVGCPLERGFVFDECGPPCPRTCFNQHIPLGELAAHCVRPCVPGCQCPAGLVEHEAHCIPPEACPQVLLTGDQPLGARPSPSREPQETP

SEQ ID NO: 116 - DNA, 4605 bp, Homo sapiens
  CDS (1)...(4605)
atggagctcagagaacagaataaggacctgcagacgagggtgaggcagctggagtcctgtgagtgccaccctgcatctccccagtgctgggggctggggcgtgcctggcccgagggggcacgctgggagcctgacgcctgcacagcctgcgtctgccaggatggggccgctcactgtggcccccaagcacacctgccccattgcaggggctgcagccaaaatggccagacctacggcaacggggagaccttctccccagatgcctgcaccacctgccgctgtctggaaggtaccatcacttgcaaccagaagccatgcccaagaggaccctgccctgagccaggagcatgctgcccgcactgtaagccaggctgtgattatgaggggcagctttatgaggagggggtcaccttcctgtccagctccaacccttgtctacagtgcacctgcctgaggagccgagttcgctgcatggccctgaagtgcccgcctagcccctgcccagagccagtgctgaggcctgggcactgctgcccaacctgccaaggctgcacagaaggtggctctcactgggaacatggccaagagtggacaacacctggggacccctgccgaatctgccggtgcctggagggtcacatccagtgccgccagcgagaatgtgccagcctgtgtccatacccagcccggcccctcccaggcacctgctgccctgtgtgtgatggctgtttcctaaacgggcgggagcaccgcagcggggagcctgtgggctcaggggacccctgctcgcactgccgctgtgctaatgggagtgtccagtgtgagcctctgccctgcccgccagtgccctgcagacacccaggcaagatccctgggcagtgctgccctgtctgcgatggctgtgagtaccagggacaccagtatcagagccaggagaccttcagactccaagagcggggcctctgtgtccgctgctcctgccaggctggcgaggtctcctgtgaggagcaggagtgcccagtcaccccctgtgccctgcctgcctctggccgccagctctgcccagctcaccctgaccagcctgccccacccacctgtgagctggatggagaggagtttgctgagggagtccagtgggagcctgatggtcggccctgcaccgcctgcgtctgtcaagatggggtacccaagtgcggggctgtgctctgccccccagccccctgccagcaccccacccagccccctggtgcctgctgccccagctgtgacagctgcacctaccacagccaagtgtatgccaatgggcagaacttcacggatgcagacagcccttgccatgcctgccactgtcaggatggaactgtgacatgctccttggttgactgccctcccacgacctgtgccaggccccagagtggaccaggccagtgttgccccaggtgcccagactgcatcctggaggaagaggtgtttgtggacggcgagagcttctcccacccccgagacccctgccaggagtgccgatgccaggaaggccatgcccactgccagcctcgcccctgccccagggccccctgtgcccacccgctgcctgggacctgctgcccgaacgactgcagcggctgtgcctttggcgggaaagagtaccccagcggagcggacttcccccacccctctgacccctgccgtctgtgtcgctgtctgagcggcaacgtgcagtgcctggcccgccgctgcgtgccgctgccctgtccagagcctgtcctgctgccgggagagtgctgcccgcagtgcccagccgccccagcccccgccggctgcccacggcccggcgcggcccacgcccgccaccaggagtacttctccccgcccggcgatccctgccgccgctgcctctgcctcgacggctccgtgtcctgccagcggctgccctgcccgcccgcgccctgcgcgcacccgcgccaggggccttgctgcccctcctgcgacggctgcctgtaccaggggaaggagtttgccagcggggagcgcttcccatcgcccactgctgcctgccacctctgcctttgctgggagggcagcgtgagctgcgagcccaaggcatgtgcccctgcactgtgccccttccctgccaggggcgactgctgccctgactgtgatggctgtgagtacctgggggagtcctacctgagtaaccaggagttcccagacccccgagaaccctgcaacctgtgtacctgtcttggaggcttcgtgacctgcggccgccggccctgtgagcctccgggctgcagccacccactcatcccctctgggcactgctgcccgacctgccagggatgccgctaccatggcgtcactactgcctccggagagacccttcctgacccacttgaccctacctgctccctctgcacctgccagggccgggagcaccaggatggggaggagtttgagggaccagcaggcagctgtgagtggtgtcgctgtcaggctggccaggtcagctgtgtgcggctgcagtgcccaccccttccctgcaagctccaggtcaccgagcgggggagctgctgccctcgctgcagaggctgcctggctcatggggaagagcaccccgaaggcagtagatgggtgccccccgacagtgcctgctcctcctgtgtgtgtcacgagggcgtcgtcacctgtgcacgcatccagtgcatcagctcttgcgcccagccccgccaagggccccatgactgctgtcctcaatgctctgactgtgagcatgagggccggaagtacgagcctggggagagcttccagcctggggcagacccctgtgaagtgtgcatctgcgagccacagcctgaggggcctcccagccttcgctgtcaccggcggcagtgtcccagcctggtgggctgcccccccagccagctcctgccccctgggccccagcactgctgtcccacctgtgccgaggccttgagtaactgttcagagggcctgctgggatctgagctagccccaccagacccctgctacacgtgccagtgccaggacctgacatggctctgcatccaccaggcttgtcctgagctcagctgtcccctctcagagcgccacactccccctgggagctgctgccccgtatgccgggaatgtgtggtggaggccgagggccggagagtggcagatggagagagctggcgggaccccagcaatgcgtgcatcgcctgcacctgccatcggggccatgtggagtgccacctcgaggagtgccaggccctctcctgcccccatggctgggcgaaggtgccccaggctgacagctgctgtgagcgatgccaagctcccacccagtcctgcgtgcaccagggccgtgaggtggcctctggagagcgctggactgtggacacctgcaccagctgctcctgcatggcgggcaccgtgcgttgccagagccagcgctgctcaccgctctcgtgtggccccgacaaggcccctgccctgagtcctggcagctgctgcccccgctgcctgcctcggcccgcttcctgcatggccttcggagacccccattaccgcaccttcgacggccgcctgctgcacttccagggcagttgcagctatgtgctggccaaggactgccacagcggggacttcagtgtgcacgtgaccaatgatgaccggggccggagcggtgtggcctggacccaggaggtggcggtgctgctgggagacatggccgtgcggctgctgcaggacggggcagtcacggtggatgggcacccggtggccttgcccttcctgcaggagccgctgctgtatgtggagctgcgaggacacactgtgatcctgcacgcccagcccgggctccaggtgctgtgggatgggcagtcccaggtggaggtgagcgtacctggctcctaccagggccggacttgtgggctctgtgggaacttcaatggctttgcccaggacgatctgcagggccctgaggggctgctcctgccctcggaggctgcgtttgggaatagctggcaggtctcagaggggctgtggcctggccggccctgttctgcaggccgagaggtggatccgtgccgggcagcaggttaccgtgccaggcgtgaggccaatgcccggtgtggggtgctgaagtcctccccattcagtcgctgccatgctgtggtgccaccggagcccttctttgccgcctgtgtgtatgacctgtgtgcctgtggccctggctcctccgctgatgcctgcctctgtgatgccctggaagcctacgccagtcactgtcgccaggcaggagtgacacctacctggcgaggccccacgctgtgtgtggtaggctgccccctggagcgtggcttcgtgtttgatgagtgcggcccaccctgtccccgcacctgcttcaatcagcatatccccctgggggagctggcagcccactgcgtgaggccctgcgtgcccggctgccagtgccctgcaggcctggtggagcatgaggcccactgcatcccacccgaggcctgcccccaagtcctgctcactggagaccagccacttggtgctcggcccagccccagccgggagccccaggagacaccc

SEQ ID NO: 117 - protein, 1535 aa, Homo sapiens
MELREQNKDLQTRVRQLESCECHPASPQCWGLGRAWPEGARWEPDACTACVCQDGAAHCGPQAHLPHCRGCSQNGQTYGNGETFSPDACTTCRCLEGTITCNQKPCPRGPCPEPGACCPHCKPGCDYEGQLYEEGVTFLSSSNPCLQCTCLRSRVRCMALKCPPSPCPEPVLRPGHCCPTCQGCTEGGSHWEHGQEWTTPGDPCRICRCLEGHIQCRQRECASLCPYPARPLPGTCCPVCDGCFLNGREHRSGEPVGSGDPCSHCRCANGSVQCEPLPCPPVPCRHPGKIPGQCCPVCDGCEYQGHQYQSQETFRLQERGLCVRCSCQAGEVSCEEQECPVTPCALPASGRQLCPAHPDQPAPPTCELDGEEFAEGVQWEPDGRPCTACVCQDGVPKCGAVLCPPAPCQHPTQPPGACCPSCDSCTYHSQVYANGQNFTDADSPCHACHCQDGTVTCSLVDCPPTTCARPQSGPGQCCPRCPDCILEEEVFVDGESFSHPRDPCQECRCQEGHAHCQPRPCPRAPCAHPLPGTCCPNDCSGCAFGGKEYPSGADFPHPSDPCRLCRCLSGNVQCLARRCVPLPCPEPVLLPGECCPQCPAAPAPAGCPRPGAAHARHQEYFSPPGDPCRRCLCLDGSVSCQRLPCPPAPCAHPRQGPCCPSCDGCLYQGKEFASGERFPSPTAACHLCLCWEGSVSCEPKACAPALCPFPARGDCCPDCDGCEYLGESYLSNQEFPDPREPCNLCTCLGGFVTCGRRPCEPPGCSHPLIPSGHCCPTCQGCRYHGVTTASGETLPDPLDPTCSLCTCQGREHQDGEEFEGPAGSCEWCRCQAGQVSCVRLQCPPLPCKLQVTERGSCCPRCRGCLAHGEEHPEGSRWVPPDSACSSCVCHEGVVTCARIQCISSCAQPRQGPHDCCPQCSDCEHEGRKYEPGESFQPGADPCEVCICEPQPEGPPSLRCHRRQCPSLVGCPPSQLLPPGPQHCCPTCAEALSNCSEGLLGSELAPPDPCYTCQCQDLTWLCIHQACPELSCPLSERHTPPGSCCPVCRECVVEAEGRRVADGESWRDPSNACIACTCHRGHVECHLEECQALSCPHGWAKVPQADSCCERCQAPTQSCVHQGREVASGERWTVDTCTSCSCMAGTVRCQSQRCSPLSCGPDKAPALSPGSCCPRCLPRPASCMAFGDPHYRTFDGRLLHFQGSCSYVLAKDCHSGDFSVHVTNDDRGRSGVAWTQEVAVLLGDMAVRLLQDGAVTVDGHPVALPFLQEPLLYVELRGHTVILHAQPGLQVLWDGQSQVEVSVPGSYQGRTCGLCGNFNGFAQDDLQGPEGLLLPSEAAFGNSWQVSEGLWPGRPCSAGREVDPCRAAGYRARREANARCGVLKSSPFSRCHAVVPPEPFFAACVYDLCACGPGSSADACLCDALEAYASHCRQAGVTPTWRGPTLCVVGCPLERGFVFDECGPPCPRTCFNQHIPLGELAAHCVRPCVPGCQCPAGLVEHEAHCIPPEACPQVLLTGDQPLGARPSPSREPQETP

SEQ ID NO: 118 - DNA, 3753 bp, Homo sapiens
  CDS (1)...(3753)
atgggagtgtccagtgtgagcctctgccctgcccgccagtgccctgcagacacccaggcaagatccctgggcagtgctgccctgtctgcgatggctgtgagtaccagggacaccagtatcagagccaggagaccttcagactccaagagcggggcctctgtgtccgctgctcctgccaggctggcgaggtctcctgtgaggagcaggagtgcccagtcaccccctgtgccctgcctgcctctggccgccagctctgcccagctcaccctgaccagcctgccccacccaggtgcctgctgccccagctgtgacagctgcacctaccacagccaagtgtatgccaatgggcagaacttcacggatgcagacagcccttgccatgcctgccactgtcaggatggaactgtgacatgctccttggttgactgccctcccacgacctgtgccaggccccagagtggaccaggccagtgttgccccaggtgcccagactgcatcctggaggaagaggtgtttgtggacggcgagagcttctcccacccccgagacccctgccaggagtgccgatgccaggaaggccatgcccactgccagcctcgcccctgccccagggccccctgtgcccacccgctgcctgggacctgctgcccgaacgactgcagcggctgtgcctttggcgggaaagagtaccccagcggagcggacttcccccacccctctgacccctgccgtctgtgtcgctgtctgagcggcaacgtgcagtgcctggcccgccgctgcgtgccgctgccctgtccagagcctgtcctgctgccgggagagtgctgcccgcagtgcccagccgccccagcccccgccggctgcccacggcccggcgcggcccacgcccgccaccaggagtacttctccccgcccggcgatccctgccgccgctgcctctgcctcgacggctccgtgtcctgccagcggctgccctgcccgcccgcgccctgcgcgcacccgcgccaggggccttgctgcccctcctgcgacggctgcctgtaccaggggaaggagtttgccagcggggagcgcttcccatcgcccactgctgcctgccacctctgcctttgctgggagggcagcgtgagctgcgagcccaaggcatgtgcccctgcactgtgccccttccctgccaggggcgactgctgccctgactgtgatggctgtgagtacctgggggagtcctacctgagtaaccaggagttcccagacccccgagaaccctgcaacctgtgtacctgtcttggaggcttcgtgacctgcggccgccggccctgtgagcctccgggctgcagccacccactcatcccctctgggcactgctgcccgacctgccagggatgccgctaccatggcgtcactactgcctccggagagacccttcctgacccacttgaccctacctgctccctctgcacctgccaggaaggttccatgcgctgccaaaagaagccatgtgccccagctctctgcccccacccctctccaggcccctgcttctgccctgtttgccacagttgtctctctcagggccgggagcaccaggatggggaggagtttgagggaccagcaggcagctgtgagtggtgtcgctgtcaggctggccaggtcagctgtgtgcggctgcagtgcccaccccttccctgcaagctccaggtcaccgagcgggggagctgctgccctcgctgcagaggctgcctggctcatggggaagagcaccccgaaggcagtagatgggtgccccccgacagtgcctgctcctcctgtgtgtgtcacgagggcgtcgtcacctgtgcacgcatccagtgcatcagctcttgcgcccagccccgccaagggccccatgactgctgtcctcaatgctctgactgtgagcatgagggccggaagtacgagcctggggagagcttccagcctggggcagacccctgtgaagtgtgcatctgcgagccacagcctgaggggcctcccagccttcgctgtcaccggcggcagtgtcccagcctggtgggctgcccccccagccagctcctgccccctgggccccagcactgctgtcccacctgtgccgaggccttgagtaactgttcagagggcctgctgggatctgagctagccccaccagacccctgctacacgtgccagtgccaggacctgacatggctctgcatccaccaggcttgtcctgagctcagctgtcccctctcagagcgccacactccccctgggagctgctgccccgtatgccgggaatgtgtggtggaggccgagggccggagagtggcagatggagagagctggcgggaccccagcaatgcgtgcatcgcctgcacctgccatcggggccatgtggagtgccacctcgaggagtgccaggccctctcctgcccccatggctgggcgaaggtgccccaggctgacagctgctgtgagcgatgccaagctcccacccagtcctgcgtgcaccagggccgtgaggtggcctctggagagcgctggactgtggacacctgcaccagctgctcctgcatggcgggcaccgtgcgttgccagagccagcgctgctcaccgctctcgtgtggccccgacaaggcccctgccctgagtcctggcagctgctgcccccgctgcctgcctcggcccgcttcctgcatggccttcggagacccccattaccgcaccttcgacggccgcctgctgcacttccagggcagttgcagctatgtgctggccaaggactgccacagcggggacttcagtgtgcacgtgaccaatgatgaccggggccggagcggtgtggcctggacccaggaggtggcggtgctgctgggagacatggccgtgcggctgctgcaggacggggcagtcacggtggatgggcacccggtggccttgcccttcctgcaggagccgctgctgtatgtggagctgcgaggacacactgtgatcctgcacgcccagcccgggctccaggtgctgtgggatgggcagtcccaggtggaggtgagcgtacctggctcctaccagggccggacttgtgggctctgtgggaacttcaatggctttgcccaggacgatctgcagggccctgaggggctgctcctgccctcggaggctgcgtttgggaatagctggcaggtctcagaggggctgtggcctggccggccctgttctgcaggccgagaggtggatccgtgccgggcagcaggttaccgtgccaggcgtgaggccaatgcccggtgtggggtgctgaagtcctccccattcagtcgctgccatgctgtggtgccaccggagcccttctttgccgcctgtgtgtatgacctgtgtgcctgtggccctggctcctccgctgatgcctgcctctgtgatgccctggaagcctacgccagtcactgtcgccaggcaggagtgacacctacctggcgaggccccacgctgtgtgtggtaggctgccccctggagcgtggcttcgtgtttgatgagtgcggcccaccctgtccccgcacctgcttcaatcagcatatccccctgggggagctggcagcccactgcgtgaggccctgcgtgcccggctgccagtgccctgcaggcctggtggagcatgaggcccactgcatcccacccgaggcctgcccccaagtcctgctcactggagaccagccacttggtgctcggcccagccccagccgggagccccaggagacaccc

SEQ ID NO: 119 - protein, 1251 aa, Homo sapiens
MGVSSVSLCPARQCPADTQARSLGSAALSAMAVSTRDTSIRARRPSDSKSGASVSAAPARLARSPVRSRSAQSPPVPCLPLAASSAQLTLTSLPHPGACCPSCDSCTYHSQVYANGQNFTDADSPCHACHCQDGTVTCSLVDCPPTTCARPQSGPGQCCPRCPDCILEEEVFVDGESFSHPRDPCQECRCQEGHAHCQPRPCPRAPCAHPLPGTCCPNDCSGCAFGGKEYPSGADFPHPSDPCRLCRCLSGNVQCLARRCVPLPCPEPVLLPGECCPQCPAAPAPAGCPRPGAAHARHQEYFSPPGDPCRRCLCLDGSVSCQRLPCPPAPCAHPRQGPCCPSCDGCLYQGKEFASGERFPSPTAACHLCLCWEGSVSCEPKACAPALCPFPARGDCCPDCDGCEYLGESYLSNQEFPDPREPCNLCTCLGGFVTCGRRPCEPPGCSHPLIPSGHCCPTCQGCRYHGVTTASGETLPDPLDPTCSLCTCQEGSMRCQKKPCAPALCPHPSPGPCFCPVCHSCLSQGREHQDGEEFEGPAGSCEWCRCQAGQVSCVRLQCPPLPCKLQVTERGSCCPRCRGCLAHGEEHPEGSRWVPPDSACSSCVCHEGVVTCARIQCISSCAQPRQGPHDCCPQCSDCEHEGRKYEPGESFQPGADPCEVCICEPQPEGPPSLRCHRRQCPSLVGCPPSQLLPPGPQHCCPTCAEALSNCSEGLLGSELAPPDPCYTCQCQDLTWLCIHQACPELSCPLSERHTPPGSCCPVCRECVVEAEGRRVADGESWRDPSNACIACTCHRGHVECHLEECQALSCPHGWAKVPQADSCCERCQAPTQSCVHQGREVASGERWTVDTCTSCSCMAGTVRCQSQRCSPLSCGPDKAPALSPGSCCPRCLPRPASCMAFGDPHYRTFDGRLLHFQGSCSYVLAKDCHSGDFSVHVTNDDRGRSGVAWTQEVAVLLGDMAVRLLQDGAVTVDGHPVALPFLQEPLLYVELRGHTVILHAQPGLQVLWDGQSQVEVSVPGSYQGRTCGLCGNFNGFAQDDLQGPEGLLLPSEAAFGNSWQVSEGLWPGRPCSAGREVDPCRAAGYRARREANARCGVLKSSPFSRCHAVVPPEPFFAACVYDLCACGPGSSADACLCDALEAYASHCRQAGVTPTWRGPTLCVVGCPLERGFVFDECGPPCPRTCFNQHIPLGELAAHCVRPCVPGCQCPAGLVEHEAHCIPPEACPQVLLTGDQPLGARPSPSREPQETP

SEQ ID NO: 120 - DNA, 3576 bp, Homo sapiens
  CDS (1)...(3576)
atggccaagagtggacaacacctggggacccctgccgaatctgccggtgcctggagggtcacatccagtgccgccagcgagaatgtgccagcctgtgtccatacccagcccggcccctcccaggcacctgctgccctgtgtgtgatgaatgggagtgtccagtgtgagcctctgccctgcccgccagtgccctgcagacacccaggcaagatccctgggcagtgctgccccagctgtgacagctgcacctaccacagccaagtgtatgccaatgggcagaacttcacggatgcagacagcccttgccatgcctgccactgtcaggatggaactgtgacatgctccttggttgactgccctcccacgacctgtgccaggccccagagtggaccaggccagtgttgccccaggtgcccagactgcatcctggaggaagaggtgtttgtggacggcgagagcttctcccacccccgagacccctgccaggagtgccgatgccaggaaggccatgcccactgccagcctcgcccctgccccagggccccctgtgcccacccgctgcctgggacctgctgcccgaacgactgcagcggctgtgcctttggcgggaaagagtaccccagcggagcggacttcccccacccctctgacccctgccgtctgtgtcgctgtctgagcggcaacgtgcagtgcctggcccgccgctgcgtgccgctgccctgtccagagcctgtcctgctgccgggagagtgctgcccgcagtgcccagccgccccagcccccgccggctgcccacggcccggcgcggcccacgcccgccaccaggagtacttctccccgcccggcgatccctgccgccgctgcctctgcctcgacggctccgtgtcctgccagcggctgccctgcccgcccgcgccctgcgcgcacccgcgccaggggccttgctgcccctcctgcgacggctgcctgtaccaggggaaggagtttgccagcggggagcgcttcccatcgcccactgctgcctgccacctctgcctttgctgggagggcagcgtgagctgcgagcccaaggcatgtgcccctgcactgtgccccttccctgccaggggcgactgctgccctgactgtgatggctgtgagtacctgggggagtcctacctgagtaaccaggagttcccagacccccgagaaccctgcaacctgtgtacctgtcttggaggcttcgtgacctgcggccgccggccctgtgagcctccgggctgcagccacccactcatcccctctgggcactgctgcccgacctgccagggatgccgctaccatggcgtcactactgcctccggagagacccttcctgacccacttgaccctacctgctccctctgcacctgccagggccgggagcaccaggatggggaggagtttgagggaccagcaggcagctgtgagtggtgtcgctgtcaggctggccaggtcagctgtgtgcggctgcagtgcccaccccttccctgcaagctccaggtcaccgagcgggggagctgctgccctcgctgcagaggctgcctggctcatggggaagagcaccccgaaggcagtagatgggtgccccccgacagtgcctgctcctcctgtgtgtgtcacgagggcgtcgtcacctgtgcacgcatccagtgcatcagctcttgcgcccagccccgccaagggccccatgactgctgtcctcaatgctctgactgtgagcatgagggccggaagtacgagcctggggagagcttccagcctggggcagacccctgtgaagtgtgcatctgcgagccacagcctgaggggcctcccagccttcgctgtcaccggcggcagtgtcccagcctggtgggctgcccccccagccagctcctgccccctgggccccagcactgctgtcccacctgtgccgaggccttgagtaactgttcagagggcctgctgggatctgagctagccccaccagacccctgctacacgtgccagtgccaggacctgacatggctctgcatccaccaggcttgtcctgagctcagctgtcccctctcagagcgccacactccccctgggagctgctgccccgtatgccgggaatgtgtggtggaggccgagggccggagagtggcagatggagagagctggcgggaccccagcaatgcgtgcatcgcctgcacctgccatcggggccatgtggagtgccacctcgaggagtgccaggccctctcctgcccccatggctgggcgaaggtgccccaggctgacagctgctgtgagcgatgccaagctcccacccagtcctgcgtgcaccagggccgtgaggtggcctctggagagcgctggactgtggacacctgcaccagctgctcctgcatggcgggcaccgtgcgttgccagagccagcgctgctcaccgctctcgtgtggccccgacaaggcccctgccctgagtcctggcagctgctgcccccgctgcctgcctcggcccgcttcctgcatggccttcggagacccccattaccgcaccttcgacggccgcctgctgcacttccagggcagttgcagctatgtgctggccaaggactgccacagcggggacttcagtgtgcacgtgaccaatgatgaccggggccggagcggtgtggcctggacccaggaggtggcggtgctgctgggagacatggccgtgcggctgctgcaggacggggcagtcacggtggatgggcacccggtggccttgcccttcctgcaggagccgctgctgtatgtggagctgcgaggacacactgtgatcctgcacgcccagcccgggctccaggtgctgtgggatgggcagtcccaggtggaggtgagcgtacctggctcctaccagggccggacttgtgggctctgtgggaacttcaatggctttgcccaggacgatctgcagggccctgaggggctgctcctgccctcggaggctgcgtttgggaatagctggcaggtctcagaggggctgtggcctggccggccctgttctgcaggccgagaggtggatccgtgccgggcagcaggttaccgtgccaggcgtgaggccaatgcccggtgtggggtgctgaagtcctccccattcagtcgctgccatgctgtggtgccaccggagcccttctttgccgcctgtgtgtatgacctgtgtgcctgtggccctggctcctccgctgatgcctgcctctgtgatgccctggaagcctacgccagtcactgtcgccaggcaggagtgacacctacctggcgaggccccacgctgtgtgtggtaggctgccccctggagcgtggcttcgtgtttgatgagtgcggcccaccctgtccccgcacctgcttcaatcagcatatccccctgggggagctggcagcccactgcgtgaggccctgcgtgcccggctgccagtgccctgcaggcctggtggagcatgaggcccactgcatcccacccgaggcctgcccccaagtcctgctcactggagaccagccacttggtgctcggcccagccccagccgggagccccaggagacaccc

SEQ ID NO: 121 - protein, 1192 aa, Homo sapiens
MAKSGQHLGTPAESAGAWRVTSSAASENVPACVHTQPGPSQAPAALCVMNGSVQCEPLPCPPVPCRHPGKIPGQCCPSCDSCTYHSQVYANGQNFTDADSPCHACHCQDGTVTCSLVDCPPTTCARPQSGPGQCCPRCPDCILEEEVFVDGESFSHPRDPCQECRCQEGHAHCQPRPCPRAPCAHPLPGTCCPNDCSGCAFGGKEYPSGADFPHPSDPCRLCRCLSGNVQCLARRCVPLPCPEPVLLPGECCPQCPAAPAPAGCPRPGAAHARHQEYFSPPGDPCRRCLCLDGSVSCQRLPCPPAPCAHPRQGPCCPSCDGCLYQGKEFASGERFPSPTAACHLCLCWEGSVSCEPKACAPALCPFPARGDCCPDCDGCEYLGESYLSNQEFPDPREPCNLCTCLGGFVTCGRRPCEPPGCSHPLIPSGHCCPTCQGCRYHGVTTASGETLPDPLDPTCSLCTCQGREHQDGEEFEGPAGSCEWCRCQAGQVSCVRLQCPPLPCKLQVTERGSCCPRCRGCLAHGEEHPEGSRWVPPDSACSSCVCHEGVVTCARIQCISSCAQPRQGPHDCCPQCSDCEHEGRKYEPGESFQPGADPCEVCICEPQPEGPPSLRCHRRQCPSLVGCPPSQLLPPGPQHCCPTCAEALSNCSEGLLGSELAPPDPCYTCQCQDLTWLCIHQACPELSCPLSERHTPPGSCCPVCRECVVEAEGRRVADGESWRDPSNACIACTCHRGHVECHLEECQALSCPHGWAKVPQADSCCERCQAPTQSCVHQGREVASGERWTVDTCTSCSCMAGTVRCQSQRCSPLSCGPDKAPALSPGSCCPRCLPRPASCMAFGDPHYRTFDGRLLHFQGSCSYVLAKDCHSGDFSVHVTNDDRGRSGVAWTQEVAVLLGDMAVRLLQDGAVTVDGHPVALPFLQEPLLYVELRGHTVILHAQPGLQVLWDGQSQVEVSVPGSYQGRTCGLCGNFNGFAQDDLQGPEGLLLPSEAAFGNSWQVSEGLWPGRPCSAGREVDPCRAAGYRARREANARCGVLKSSPFSRCHAVVPPEPFFAACVYDLCACGPGSSADACLCDALEAYASHCRQAGVTPTWRGPTLCVVGCPLERGFVFDECGPPCPRTCFNQHIPLGELAAHCVRPCVPGCQCPAGLVEHEAHCIPPEACPQVLLTGDQPLGARPSPSREPQETP

SEQ ID NO: 122 - DNA, 3621 bp, Homo sapiens
  CDS (1)...(3621)
atgggagtgtccagtgtgagcctctgccctgcccgccagtgccctgcagacacccaggcaagatccctgggcagtgctgccctgtctgcgatggctgtgagtaccagggacaccagtatcagagccaggagaccttcagactccaagagcggggcctctgtgtccgctgctcctgccaggctggcgaggtctcctgtgaggagcaggagtgcccagtcaccccctgtgccctgcctgcctctggccgccagctctgcccagggtgcctgctgccccagctgtgacagctgcacctaccacagccaagtgtatgccaatgggcagaacttcacggatgcagacagcccttgccatgcctgccactgtcaggatggaactgtgacatgctccttggttgactgccctcccacgacctgtgccaggccccagagtggaccaggccagtgttgccccaggtgcccagactgcatcctggaggaagaggtgtttgtggacggcgagagcttctcccacccccgagacccctgccaggagtgccgatgccaggaaggccatgcccactgccagcctcgcccctgccccagggccccctgtgcccacccgctgcctgggacctgctgcccgaacgactgcagcggctgtgcctttggcgggaaagagtaccccagcggagcggacttcccccacccctctgacccctgccgtctgtgtcgctgtctgagcggcaacgtgcagtgcctggcccgccgctgcgtgccgctgccctgtccagagcctgtcctgctgccgggagagtgctgcccgcagtgcccagccgccccagcccccgccggctgcccacggcccggcgcggcccacgcccgccaccaggagtacttctccccgcccggcgatccctgccgccgctgcctctgcctcgacggctccgtgtcctgccagcggctgccctgcccgcccgcgccctgcgcgcacccgcgccaggggccttgctgcccctcctgcgacggctgcctgtaccaggggaaggagtttgccagcggggagcgcttcccatcgcccactgctgcctgccacctctgcctttgctgggagggcagcgtgagctgcgagcccaaggcatgtgcccctgcactgtgccccttccctgccaggggcgactgctgccctgactgtgatggctgtgagtacctgggggagtcctacctgagtaaccaggagttcccagacccccgagaaccctgcaacctgtgtacctgtcttggaggcttcgtgacctgcggccgccggccctgtgagcctccgggctgcagccacccactcatcccctctgggcactgctgcccgacctgccagggatgccgctaccatggcgtcactactgcctccggagagacccttcctgacccacttgaccctacctgctccctctgcacctgccagggccgggagcaccaggatggggaggagtttgagggaccagcaggcagctgtgagtggtgtcgctgtcaggctggccaggtcagctgtgtgcggctgcagtgcccaccccttccctgcaagctccaggtcaccgagcgggggagctgctgccctcgctgcagaggctgcctggctcatggggaagagcaccccgaaggcagtagatgggtgccccccgacagtgcctgctcctcctgtgtgtgtcacgagggcgtcgtcacctgtgcacgcatccagtgcatcagctcttgcgcccagccccgccaagggccccatgactgctgtcctcaatgctctgactgtgagcatgagggccggaagtacgagcctggggagagcttccagcctggggcagacccctgtgaagtgtgcatctgcgagccacagcctgaggggcctcccagccttcgctgtcaccggcggcagtgtcccagcctggtgggctgcccccccagccagctcctgccccctgggccccagcactgctgtcccacctgtgccgaggccttgagtaactgttcagagggcctgctgggatctgagctagccccaccagacccctgctacacgtgccagtgccaggacctgacatggctctgcatccaccaggcttgtcctgagctcagctgtcccctctcagagcgccacactccccctgggagctgctgccccgtatgccgggaatgtgtggtggaggccgagggccggagagtggcagatggagagagctggcgggaccccagcaatgcgtgcatcgcctgcacctgccatcggggccatgtggagtgccacctcgaggagtgccaggccctctcctgcccccatggctgggcgaaggtgccccaggctgacagctgctgtgagcgatgccaagctcccacccagtcctgcgtgcaccagggccgtgaggtggcctctggagagcgctggactgtggacacctgcaccagctgctcctgcatggcgggcaccgtgcgttgccagagccagcgctgctcaccgctctcgtgtggccccgacaaggcccctgccctgagtcctggcagctgctgcccccgctgcctgcctcggcccgcttcctgcatggccttcggagacccccattaccgcaccttcgacggccgcctgctgcacttccagggcagttgcagctatgtgctggccaaggactgccacagcggggacttcagtgtgcacgtgaccaatgatgaccggggccggagcggtgtggcctggacccaggaggtggcggtgctgctgggagacatggccgtgcggctgctgcaggacggggcagtcacggtggatgggcacccggtggccttgcccttcctgcaggagccgctgctgtatgtggagctgcgaggacacactgtgatcctgcacgcccagcccgggctccaggtgctgtgggatgggcagtcccaggtggaggtgagcgtacctggctcctaccagggccggacttgtgggctctgtgggaacttcaatggctttgcccaggacgatctgcagggccctgaggggctgctcctgccctcggaggctgcgtttgggaatagctggcaggtctcagaggggctgtggcctggccggccctgttctgcaggccgagaggtggatccgtgccgggcagcaggttaccgtgccaggcgtgaggccaatgcccggtgtggggtgctgaagtcctccccattcagtcgctgccatgctgtggtgccaccggagcccttctttgccgcctgtgtgtatgacctgtgtgcctgtggccctggctcctccgctgatgcctgcctctgtgatgccctggaagcctacgccagtcactgtcgccaggcaggagtgacacctacctggcgaggccccacgctgtgtgtggtaggctgccccctggagcgtggcttcgtgtttgatgagtgcggcccaccctgtccccgcacctgcttcaatcagcatatccccctgggggagctggcagcccactgcgtgaggccctgcgtgcccggctgccagtgccctgcaggcctggtggagcatgaggcccactgcatcccacccgaggcctgcccccaagtcctgctcactggagaccagccacttggtgctcggcccagccccagccgggagccccaggagacaccc

SEQ ID NO: 123 - protein, 1207 aa, Homo sapiens
MGVSSVSLCPARQCPADTQARSLGSAALSAMAVSTRDTSIRARRPSDSKSGASVSAAPARLARSPVRSRSAQSPPVPCLPLAASSAQGACCPSCDSCTYHSQVYANGQNFTDADSPCHACHCQDGTVTCSLVDCPPTTCARPQSGPGQCCPRCPDCILEEEVFVDGESFSHPRDPCQECRCQEGHAHCQPRPCPRAPCAHPLPGTCCPNDCSGCAFGGKEYPSGADFPHPSDPCRLCRCLSGNVQCLARRCVPLPCPEPVLLPGECCPQCPAAPAPAGCPRPGAAHARHQEYFSPPGDPCRRCLCLDGSVSCQRLPCPPAPCAHPRQGPCCPSCDGCLYQGKEFASGERFPSPTAACHLCLCWEGSVSCEPKACAPALCPFPARGDCCPDCDGCEYLGESYLSNQEFPDPREPCNLCTCLGGFVTCGRRPCEPPGCSHPLIPSGHCCPTCQGCRYHGVTTASGETLPDPLDPTCSLCTCQGREHQDGEEFEGPAGSCEWCRCQAGQVSCVRLQCPPLPCKLQVTERGSCCPRCRGCLAHGEEHPEGSRWVPPDSACSSCVCHEGVVTCARIQCISSCAQPRQGPHDCCPQCSDCEHEGRKYEPGESFQPGADPCEVCICEPQPEGPPSLRCHRRQCPSLVGCPPSQLLPPGPQHCCPTCAEALSNCSEGLLGSELAPPDPCYTCQCQDLTWLCIHQACPELSCPLSERHTPPGSCCPVCRECVVEAEGRRVADGESWRDPSNACIACTCHRGHVECHLEECQALSCPHGWAKVPQADSCCERCQAPTQSCVHQGREVASGERWTVDTCTSCSCMAGTVRCQSQRCSPLSCGPDKAPALSPGSCCPRCLPRPASCMAFGDPHYRTFDGRLLHFQGSCSYVLAKDCHSGDFSVHVTNDDRGRSGVAWTQEVAVLLGDMAVRLLQDGAVTVDGHPVALPFLQEPLLYVELRGHTVILHAQPGLQVLWDGQSQVEVSVPGSYQGRTCGLCGNFNGFAQDDLQGPEGLLLPSEAAFGNSWQVSEGLWPGRPCSAGREVDPCRAAGYRARREANARCGVLKSSPFSRCHAVVPPEPFFAACVYDLCACGPGSSADACLCDALEAYASHCRQAGVTPTWRGPTLCVVGCPLERGFVFDECGPPCPRTCFNQHIPLGELAAHCVRPCVPGCQCPAGLVEHEAHCIPPEACPQVLLTGDQPLGARPSPSREPQETP

SEQ ID NO: 124 - DNA, 2277 bp, Homo sapiens
  CDS (1)...(2277)
atgcgctgccaaaagaagccatgtgccccagctctctgcccccacccctctccaggcccctgcttctgccctgtttgccacagttgtctctctcagggccgggagcaccaggatggggaggagtttgagggaccagcaggcagctgtgagtggtgtcgctgtcaggctggccaggtcagctgtgtgcggctgcagtgcccaccccttccctgcaagctccaggtcaccgagcgggggagctgctgccctcgctgcagaggctgcctggctcatggggaagagcaccccgaaggcagtagatgggtgccccccgacagtgcctgctcctcctgtgtgtgtcacgagggcgtcgtcacctgtgcacgcatccagtgcatcagctcttgcgcccagccccgccaagggccccatgactgctgtcctcaatgctctgactgtgagcatgagggccggaagtacgagcctggggagagcttccagcctggggcagacccctgtgaagtgtgcatctgcgagccacagcctgaggggcctcccagccttcgctgtcaccggcggcagtgtcccagcctggtgggctgcccccccagccagctcctgccccctgggccccagcactgctgtcccacctgtgccgaggccttgagtaactgttcagagggcctgctgggatctgagctagccccaccagacccctgctacacgtgccagtgccaggacctgacatggctctgcatccaccaggcttgtcctgagctcagctgtcccctctcagagcgccacactccccctgggagctgctgccccgtatgccgggaatgtgtggtggaggccgagggccggagagtggcagatggagagagctggcgggaccccagcaatgcgtgcatcgcctgcacctgccatcggggccatgtggagtgccacctcgaggagtgccaggccctctcctgcccccatggctgggcgaaggtgccccaggctgacagctgctgtgagcgatgccaagctcccacccagtcctgcgtgcaccagggccgtgaggtggcctctggagagcgctggactgtggacacctgcaccagctgctcctgcatggcgggcaccgtgcgttgccagagccagcgctgctcaccgctctcgtgtggccccgacaaggcccctgccctgagtcctggcagctgctgcccccgctgcctgcctcggcccgcttcctgcatggccttcggagacccccattaccgcaccttcgacggccgcctgctgcacttccagggcagttgcagctatgtgctggccaaggactgccacagcggggacttcagtgtgcacgtgaccaatgatgaccggggccggagcggtgtggcctggacccaggaggtggcggtgctgctgggagacatggccgtgcggctgctgcaggacggggcagtcacggtggatgggcacccggtggccttgcccttcctgcaggagccgctgctgtatgtggagctgcgaggacacactgtgatcctgcacgcccagcccgggctccaggtgctgtgggatgggcagtcccaggtggaggtgagcgtacctggctcctaccagggccggacttgtgggctctgtgggaacttcaatggctttgcccaggacgatctgcagggccctgaggggctgctcctgccctcggaggctgcgtttgggaatagctggcaggtctcagaggggctgtggcctggccggccctgttctgcaggccgagaggtggatccgtgccgggcagcaggttaccgtgccaggcgtgaggccaatgcccggtgtggggtgctgaagtcctccccattcagtcgctgccatgctgtggtgccaccggagcccttctttgccgcctgtgtgtatgacctgtgtgcctgtggccctggctcctccgctgatgcctgcctctgtgatgccctggaagcctacgccagtcactgtcgccaggcaggagtgacacctacctggcgaggccccacgctgtgtgtggtaggctgccccctggagcgtggcttcgtgtttgatgagtgcggcccaccctgtccccgcacctgcttcaatcagcatatccccctgggggagctggcagcccactgcgtgaggccctgcgtgcccggctgccagtgccctgcaggcctggtggagcatgaggcccactgcatcccacccgaggcctgcccccaagtcctgctcactggagaccagccacttggtgctcggcccagccccagccgggagccccaggagacaccc

SEQ ID NO: 125 - protein, 759 aa, Homo sapiens
MRCQKKPCAPALCPHPSPGPCFCPVCHSCLSQGREHQDGEEFEGPAGSCEWCRCQAGQVSCVRLQCPPLPCKLQVTERGSCCPRCRGCLAHGEEHPEGSRWVPPDSACSSCVCHEGVVTCARIQCISSCAQPRQGPHDCCPQCSDCEHEGRKYEPGESFQPGADPCEVCICEPQPEGPPSLRCHRRQCPSLVGCPPSQLLPPGPQHCCPTCAEALSNCSEGLLGSELAPPDPCYTCQCQDLTWLCIHQACPELSCPLSERHTPPGSCCPVCRECVVEAEGRRVADGESWRDPSNACIACTCHRGHVECHLEECQALSCPHGWAKVPQADSCCERCQAPTQSCVHQGREVASGERWTVDTCTSCSCMAGTVRCQSQRCSPLSCGPDKAPALSPGSCCPRCLPRPASCMAFGDPHYRTFDGRLLHFQGSCSYVLAKDCHSGDFSVHVTNDDRGRSGVAWTQEVAVLLGDMAVRLLQDGAVTVDGHPVALPFLQEPLLYVELRGHTVILHAQPGLQVLWDGQSQVEVSVPGSYQGRTCGLCGNFNGFAQDDLQGPEGLLLPSEAAFGNSWQVSEGLWPGRPCSAGREVDPCRAAGYRARREANARCGVLKSSPFSRCHAVVPPEPFFAACVYDLCACGPGSSADACLCDALEAYASHCRQAGVTPTWRGPTLCVVGCPLERGFVFDECGPPCPRTCFNQHIPLGELAAHCVRPCVPGCQCPAGLVEHEAHCIPPEACPQVLLTGDQPLGARPSPSREPQETP

SEQ ID NO: 126 - DNA, 4026 bp, Homo sapiens
  CDS (1)...(4026)
atggccaagagtggacaacacctggggacccctgccgaatctgccggtgcctggagggtcacatccagtgccgccagcgagaatgtgccagcctgtgtccatacccagcccggcccctcccaggcacctgctgccctgtgtgtgatgaatgggagtgtccagtgtgagcctctgccctgcccgccagtgccctgcagacacccaggcaagatccctgggcagtgctgccctgtctgcgatggctgtgagtaccagggacaccagtatcagagccaggagaccttcagactccaagagcggggcctctgtgtccgctgctcctgccaggctggcgaggtctcctgtgaggagcaggagtgcccagtcaccccctgtgccctgcctgcctctggccgccagctctgcccagcctgtgagctggatggagaggagtttgctgagggagtccagtgggagcctgatggtcggccctgcaccgcctgcgtctgtcaagatggggtacccaagtgcggggctgtgctctgccccccagccccctgccagcaccccacccagccccctggtgcctgctgccccagctgtgacagctgcacctaccacagccaagtgtatgccaatgggcagaacttcacggatgcagacagcccttgccatgcctgccactgtcaggatggaactgtgacatgctccttggttgactgccctcccacgacctgtgccaggccccagagtggaccaggccagtgttgccccaggtgcccagactgcatcctggaggaagaggtgtttgtggacggcgagagcttctcccacccccgagacccctgccaggagtgccgatgccaggaaggccatgcccactgccagcctcgcccctgccccagggccccctgtgcccacccgctgcctgggacctgctgcccgaacgactgcagcggctgtgcctttggcgggaaagagtaccccagcggagcggacttcccccacccctctgacccctgccgtctgtgtcgctgtctgagcggcaacgtgcagtgcctggcccgccgctgcgtgccgctgccctgtccagagcctgtcctgctgccgggagagtgctgcccgcagtgcccagccgccccagcccccgccggctgcccacggcccggcgcggcccacgcccgccaccaggagtacttctccccgcccggcgatccctgccgccgctgcctctgcctcgacggctccgtgtcctgccagcggctgccctgcccgcccgcgccctgcgcgcacccgcgccaggggccttgctgcccctcctgcgacggctgcctgtaccaggggaaggagtttgccagcggggagcgcttcccatcgcccactgctgcctgccacctctgcctttgctgggagggcagcgtgagctgcgagcccaaggcatgtgcccctgcactgtgccccttccctgccaggggcgactgctgccctgactgtgatggctgtgagtacctgggggagtcctacctgagtaaccaggagttcccagacccccgagaaccctgcaacctgtgtacctgtcttggaggcttcgtgacctgcggccgccggccctgtgagcctccgggctgcagccacccactcatcccctctgggcactgctgcccgacctgccagggatgccgctaccatggcgtcactactgcctccggagagacccttcctgacccacttgaccctacctgctccctctgcacctgccaggaaggttccatgcgctgccaaaagaagccatgtgccccagctctctgcccccacccctctccaggcccctgcttctgccctgtttgccacagttgtctctctcagggccgggagcaccaggatggggaggagtttgagggaccagcaggcagctgtgagtggtgtcgctgtcaggctggccaggtcagctgtgtgcggctgcagtgcccaccccttccctgcaagctccaggtcaccgagcgggggagctgctgccctcgctgcagaggctgcctggctcatggggaagagcaccccgaaggcagtagatgggtgccccccgacagtgcctgctcctcctgtgtgtgtcacgagggcgtcgtcacctgtgcacgcatccagtgcatcagctcttgcgcccagccccgccaagggccccatgactgctgtcctcaatgctctgactgtgagcatgagggccggaagtacgagcctggggagagcttccagcctggggcagacccctgtgaagtgtgcatctgcgagccacagcctgaggggcctcccagccttcgctgtcaccggcggcagtgtcccagcctggtgggctgcccccccagccagctcctgccccctgggccccagcactgctgtcccacctgtgccgaggccttgagtaactgttcagagggcctgctgggatctgagctagccccaccagacccctgctacacgtgccagtgccaggacctgacatggctctgcatccaccaggcttgtcctgagctcagctgtcccctctcagagcgccacactccccctgggagctgctgccccgtatgccgggaatgtgtggtggaggccgagggccggagagtggcagatggagagagctggcgggaccccagcaatgcgtgcatcgcctgcacctgccatcggggccatgtggagtgccacctcgaggagtgccaggccctctcctgcccccatggctgggcgaaggtgccccaggctgacagctgctgtgagcgatgccaagctcccacccagtcctgcgtgcaccagggccgtgaggtggcctctggagagcgctggactgtggacacctgcaccagctgctcctgcatggcgggcaccgtgcgttgccagagccagcgctgctcaccgctctcgtgtggccccgacaaggcccctgccctgagtcctggcagctgctgcccccgctgcctgcctcggcccgcttcctgcatggccttcggagacccccattaccgcaccttcgacggccgcctgctgcacttccagggcagttgcagctatgtgctggccaaggactgccacagcggggacttcagtgtgcacgtgaccaatgatgaccggggccggagcggtgtggcctggacccaggaggtggcggtgctgctgggagacatggccgtgcggctgctgcaggacggggcagtcacggtggatgggcacccggtggccttgcccttcctgcaggagccgctgctgtatgtggagctgcgaggacacactgtgatcctgcacgcccagcccgggctccaggtgctgtgggatgggcagtcccaggtggaggtgagcgtacctggctcctaccagggccggacttgtgggctctgtgggaacttcaatggctttgcccaggacgatctgcagggccctgaggggctgctcctgccctcggaggctgcgtttgggaatagctggcaggtctcagaggggctgtggcctggccggccctgttctgcaggccgagaggtggatccgtgccgggcagcaggttaccgtgccaggcgtgaggccaatgcccggtgtggggtgctgaagtcctccccattcagtcgctgccatgctgtggtgccaccggagcccttctttgccgcctgtgtgtatgacctgtgtgcctgtggccctggctcctccgctgatgcctgcctctgtgatgccctggaagcctacgccagtcactgtcgccaggcaggagtgacacctacctggcgaggccccacgctgtgtgtggtaggctgccccctggagcgtggcttcgtgtttgatgagtgcggcccaccctgtccccgcacctgcttcaatcagcatatccccctgggggagctggcagcccactgcgtgaggccctgcgtgcccggctgccagtgccctgcaggcctggtggagcatgaggcccactgcatcccacccgaggcctgcccccaagtcctgctcactggagaccagccacttggtgctcggcccagccccagccgggagccccaggagacaccc

SEQ ID NO: 127 - protein, 1342 aa, Homo sapiens
MAKSGQHLGTPAESAGAWRVTSSAASENVPACVHTQPGPSQAPAALCVMNGSVQCEPLPCPPVPCRHPGKIPGQCCPVCDGCEYQGHQYQSQETFRLQERGLCVRCSCQAGEVSCEEQECPVTPCALPASGRQLCPACELDGEEFAEGVQWEPDGRPCTACVCQDGVPKCGAVLCPPAPCQHPTQPPGACCPSCDSCTYHSQVYANGQNFTDADSPCHACHCQDGTVTCSLVDCPPTTCARPQSGPGQCCPRCPDCILEEEVFVDGESFSHPRDPCQECRCQEGHAHCQPRPCPRAPCAHPLPGTCCPNDCSGCAFGGKEYPSGADFPHPSDPCRLCRCLSGNVQCLARRCVPLPCPEPVLLPGECCPQCPAAPAPAGCPRPGAAHARHQEYFSPPGDPCRRCLCLDGSVSCQRLPCPPAPCAHPRQGPCCPSCDGCLYQGKEFASGERFPSPTAACHLCLCWEGSVSCEPKACAPALCPFPARGDCCPDCDGCEYLGESYLSNQEFPDPREPCNLCTCLGGFVTCGRRPCEPPGCSHPLIPSGHCCPTCQGCRYHGVTTASGETLPDPLDPTCSLCTCQEGSMRCQKKPCAPALCPHPSPGPCFCPVCHSCLSQGREHQDGEEFEGPAGSCEWCRCQAGQVSCVRLQCPPLPCKLQVTERGSCCPRCRGCLAHGEEHPEGSRWVPPDSACSSCVCHEGVVTCARIQCISSCAQPRQGPHDCCPQCSDCEHEGRKYEPGESFQPGADPCEVCICEPQPEGPPSLRCHRRQCPSLVGCPPSQLLPPGPQHCCPTCAEALSNCSEGLLGSELAPPDPCYTCQCQDLTWLCIHQACPELSCPLSERHTPPGSCCPVCRECVVEAEGRRVADGESWRDPSNACIACTCHRGHVECHLEECQALSCPHGWAKVPQADSCCERCQAPTQSCVHQGREVASGERWTVDTCTSCSCMAGTVRCQSQRCSPLSCGPDKAPALSPGSCCPRCLPRPASCMAFGDPHYRTFDGRLLHFQGSCSYVLAKDCHSGDFSVHVTNDDRGRSGVAWTQEVAVLLGDMAVRLLQDGAVTVDGHPVALPFLQEPLLYVELRGHTVILHAQPGLQVLWDGQSQVEVSVPGSYQGRTCGLCGNFNGFAQDDLQGPEGLLLPSEAAFGNSWQVSEGLWPGRPCSAGREVDPCRAAGYRARREANARCGVLKSSPFSRCHAVVPPEPFFAACVYDLCACGPGSSADACLCDALEAYASHCRQAGVTPTWRGPTLCVVGCPLERGFVFDECGPPCPRTCFNQHIPLGELAAHCVRPCVPGCQCPAGLVEHEAHCIPPEACPQVLLTGDQPLGARPSPSREPQETP

SEQ ID NO: 128 - DNA, 5776 bp, Homo sapiens
ctggctggccctggctttcctctgtgacctcagctccaggcactgaggccaggtcttagcgtggcattgcagcctccctgccccctgtggcaaaggctcaggtccactatgggcccagactctggggcagagaagctgccgtctccttactgaagctttaagcttggtggagagtgggctggggagacctcagtccctgcctggtctagggggaggggtggcttccgacttctggtctttatgacagggagggagagctttggaagggttcacagctccgccctcaatgttcctttttgcctgtgagcttcgcctgtgagacccaaccctctgcttcccagcttcaaggaggagtttcccagcctgtgggcccacagggacggctgtcctcacttcctccctttggccccctctgcctgctgagcccagggcccagccctgccccctacccaggctcaccccacagccaggcctgagctcaggagtgggaaatggggctgagaccagccagtgaagggcggccttggcatttggggccaagcctgggactgctgggggtctcctcctggatcttaagcggagacaaggcctacacccccgttgggcttcctgcgagctggagctgctctctgggcgcctgctgagccgcgacgacagacggcgagccgagcgaggcggagctagcatggccggggtcggggccgctgcgctgtcccttctcctgcacctcggggccctggcgctggccgcgggcgcggaaggtggggctgtccccagggagccccctgggcagcagacaactgcccattcctcagtccttgctgggaactcccaggagcagtggcaccccctgcgagagtggctggggcgactggaggctgcagtgatggagctcagagaacagaataaggacctgcagacgagggtgaggcagctggagtcctgtgagtgccaccctgcatctccccagtgctgggggctggggcgtgcctggcccgagggggcacgctgggagcctgacgcctgcacagcctgcgtctgccaggatggggccgctcactgtggcccccaagcacacctgccccattgcaggggctgcagccaaaatggccagacctacggcaacggggagaccttctccccagatgcctgcaccacctgccgctgtctggaaggtaccatcacttgcaaccagaagccatgcccaagaggaccctgccctgagccaggagcatgctgcccgcactgtaagccaggctgtgattatgaggggcagctttatgaggagggggtcaccttcctgtccagctccaacccttgtctacagtgcacctgcctgaggagccgagttcgctgcatggccctgaagtgcccgcctagcccctgcccagagccagtgctgaggcctgggcactgctgcccaacctgccaaggctgcacagaaggtggctctcactgggaacatggccaagagtggacaacacctggggacccctgccgaatctgccggtgcctggagggtcacatccagtgccgccagcgagaatgtgccagcctgtgtccatacccagcccggcccctcccaggcacctgctgccctgtgtgtgatggctgtttcctaaacgggcgggagcaccgcagcggggagcctgtgggctcaggggacccctgctcgcactgccgctgtgctaatgggagtgtccagtgtgagcctctgccctgcccgccagtgccctgcagacacccaggcaagatccctgggcagtgctgccctgtctgcgatggctgtgagtaccagggacaccagtatcagagccaggagaccttcagactccaagagcggggcctctgtgtccgctgctcctgccaggctggcgaggtctcctgtgaggagcaggagtgcccagtcaccccctgtgccctgcctgcctctggccgccagctctgcccagcctgtgagctggatggagaggagtttgctgagggagtccagtgggagcctgatggtcggccctgcaccgcctgcgtctgtcaagatggggtacccaagtgcggggctgtgctctgccccccagccccctgccagcaccccacccagccccctggtgcctgctgccccagctgtgacagctgcacctaccacagccaagtgtatgccaatgggcagaacttcacggatgcagacagcccttgccatgcctgccactgtcaggatggaactgtgacatgctccttggttgactgccctcccacgacctgtgccaggccccagagtggaccaggccagtgttgccccaggtgcccagactgcatcctggaggaagaggtgtttgtggacggcgagagcttctcccacccccgagacccctgccaggagtgccgatgccaggaaggccatgcccactgccagcctcgcccctgccccagggccccctgtgcccacccgctgcctgggacctgctgcccgaacgactgcagcggctgtgcctttggcgggaaagagtaccccagcggagcggacttcccccacccctctgacccctgccgtctgtgtcgctgtctgagcggcaacgtgcagtgcctggcccgccgctgcgtgccgctgccctgtccagagcctgtcctgctgccgggagagtgctgcccgcagtgcccagccgccccagcccccgccggctgcccacggcccggcgcggcccacgcccgccaccaggagtacttctccccgcccggcgatccctgccgccgctgcctctgcctcgacggctccgtgtcctgccagcggctgccctgcccgcccgcgccctgcgcgcacccgcgccaggggccttgctgcccctcctgcgacggctgcctgtaccaggggaaggagtttgccagcggggagcgcttcccatcgcccactgctgcctgccacctctgcctttgctgggagggcagcgtgagctgcgagcccaaggcatgtgcccctgcactgtgccccttccctgccaggggcgactgctgccctgactgtgatggctgtgagtacctgggggagtcctacctgagtaaccaggagttcccagacccccgagaaccctgcaacctgtgtacctgtcttggaggcttcgtgacctgcggccgccggccctgtgagcctccgggctgcagccacccactcatcccctctgggcactgctgcccgacctgccagggatgccgctaccatggcgtcactactgcctccggagagacccttcctgacccacttgaccctacctgctccctctgcacctgccaggaaggttccatgcgctgccaaaagaagccatgtgccccagctctctgcccccacccctctccaggcccctgcttctgccctgtttgccacagttgtctctctcagggccgggagcaccaggatggggaggagtttgagggaccagcaggcagctgtgagtggtgtcgctgtcaggctggccaggtcagctgtgtgcggctgcagtgcccaccccttccctgcaagctccaggtcaccgagcgggggagctgctgccctcgctgcagaggctgcctggctcatggggaagagcaccccgaaggcagtagatgggtgccccccgacagtgcctgctcctcctgtgtgtgtcacgagggcgtcgtcacctgtgcacgcatccagtgcatcagctcttgcgcccagccccgccaagggccccatgactgctgtcctcaatgctctgactgtgagcatgagggccggaagtacgagcctggggagagcttccagcctggggcagacccctgtgaagtgtgcatctgcgagccacagcctgaggggcctcccagccttcgctgtcaccggcggcagtgtcccagcctggtgggctgcccccccagccagctcctgccccctgggccccagcactgctgtcccacctgtgccgaggccttgagtaactgttcagagggcctgctgggatctgagctagccccaccagacccctgctacacgtgccagtgccaggacctgacatggctctgcatccaccaggcttgtcctgagctcagctgtcccctctcagagcgccacactccccctgggagctgctgccccgtatgccgggaatgtgtggtggaggccgagggccggagagtggcagatggagagagctggcgggaccccagcaatgcgtgcatcgcctgcacctgccatcggggccatgtggagtgccacctcgaggagtgccaggccctctcctgcccccatggctgggcgaaggtgccccaggctgacagctgctgtgagcgatgccaagctcccacccagtcctgcgtgcaccagggccgtgaggtggcctctggagagcgctggactgtggacacctgcaccagctgctcctgcatggcgggcaccgtgcgttgccagagccagcgctgctcaccgctctcgtgtggccccgacaaggcccctgccctgagtcctggcagctgctgcccccgctgcctgcctcggcccgcttcctgcatggccttcggagacccccattaccgcaccttcgacggccgcctgctgcacttccagggcagttgcagctatgtgctggccaaggactgccacagcggggacttcagtgtgcacgtgaccaatgatgaccggggccggagcggtgtggcctggacccaggaggtggcggtgctgctgggagacatggccgtgcggctgctgcaggacggggcagtcacggtggatgggcacccggtggccttgcccttcctgcaggagccgctgctgtatgtggagctgcgaggacacactgtgatcctgcacgcccagcccgggctccaggtgctgtgggatgggcagtcccaggtggaggtgagcgtacctggctcctaccagggccggacttgtgggctctgtgggaacttcaatggctttgcccaggacgatctgcagggccctgaggggctgctcctgccctcggaggctgcgtttgggaatagctggcaggtctcagaggggctgtggcctggccggccctgttctgcaggccgagaggtggatccgtgccgggcagcaggttaccgtgccaggcgtgaggccaatgcccggtgtggggtgctgaagtcctccccattcagtcgctgccatgctgtggtgccaccggagcccttctttgccgcctgtgtgtatgacctgtgtgcctgtggccctggctcctccgctgatgcctgcctctgtgatgccctggaagcctacgccagtcactgtcgccaggcaggagtgacacctacctggcgaggccccacgctgtgtgtggtaggctgccccctggagcgtggcttcgtgtttgatgagtgcggcccaccctgtccccgcacctgcttcaatcagcatatccccctgggggagctggcagcccactgcgtgaggccctgcgtgcccggctgccagtgccctgcaggcctggtggagcatgaggcccactgcatcccacccgaggcctgcccccaagtcctgctcactggagaccagccacttggtgctcggcccagccccagccgggagccccaggagacaccctgagccaggacagtgcctgataagggttcatcaggccaggagtctccccttggcgagcagttcccaccctggttagggctatggagagaatgccctgcctggacactggagcctgggcccctgccctgcaaagacccccgccatgttgagtcaccagcagtaaactctaggcctgcccgaaggctaaaaaaaaaaaaaaaaaaaaaa

SEQ ID NO: 129 - DNA, 2154 bp, Homo sapiens
  CDS (1)...(2154)
atgactttctctgttcttctttgcagcacgtccacggacgccatgctggggactctgacacccctgtcttcgctgctgctgctgctactggtgctggtgctggggtgtgggccgcgggcgtcctctggtggcggggccggtggggcggcgggctatgccccagtgaagtacatccagcccatgcagaaaggacctgtgggaccgcccttccgtgagggcaaaggccagtacctggaaatgcctctaccgctgctgccgatggacctgaagggagagcccggcccccctgggaagcccgggcctcggggtccccctggcccccctggcttcccaggaaaaccaggcatgggaaagccaggactccatgggcagcctggccctgctgggccccctggcttctcccggatgggcaaggctggtcccccagggctccctggcaaggtcgggccaccagggcagccggggcttcggggggagccaggaatacgaggggaccagggcctccggggacccccaggaccccctggcctcccgggcccctcaggcattactatccctggaaaaccaggtgcccaaggggtgccagggcccccaggattccagggggaaccagggccccagggggagcctgggcccccaggtgatcgaggcctcaagggggataatggagtgggccagcccgggctgcctggggccccagggcaggggggtgcccccggcccccccggcctccctggtccagctggcttaggcaaacctggtttggatgggcttcctggggccccaggagacaagggtgagtctgggcctcctggagttccaggccccaggggggagccaggagctgtgggcccaaaaggacctcctggagtagacggtgtgggagtcccaggggcagcagggttgccaggaccacagggcccatcaggggccaaaggggagccagggacccggggcccccctgggctgataggccccactggctatgggatgccaggactgccaggccccaagggggacaggggcccagctggggtcccaggactcttgggggacaggggtgagccaggggaggatggggagccaggggagcagggcccacagggtcttgggggtccccctggacttcctgggtctgcagggcttcctggcagacgtgggccccctgggcctaagggtgaggcagggcctggaggacccccaggagtgcctggcattcgaggtgaccaggggcctagtggcctggctgggaaaccaggggtcccaggtgagaggggacttcctggggcccatggaccccctggaccaactgggcccaagggtgagccgggtttcacgggtcgccctggaggaccaggggtggcaggagccctggggcagaaaggtgacttggggctccctgggcagcctggcctgaggggtccctcaggaatcccaggactccagggtccagctggccctattgggccccaaggcctgccgggcctgaagggggaaccaggcctgccagggccccctggagaggggagagcaggggaacctggcacggctgggcccacggggcccccaggggtccctggctcccctggaatcacgggccctccggggcctcccgggcccccgggaccccctggtgcccctggggccttcgatgagactggcatcgcaggcttgcacctgcccaacggcggtgtggagggtgccgtgctgggcaaggggggcaagccacagtttgggctgggcgagctgtctgcccatgccacaccggccttcactgcggtgctcacctcgcccttccccgcctcgggcatgcccgtgaaatttgaccggactctctacaatggccacagcggctacaacccagccactggcatcttcacctgccctgtgggcggcgtctactactttgcttaccatgtgcacgtcaagggcaccaacgtgtgggtggccctgtacaagaacaacgtgccggccacctatacctacgatgagtacaagaagggctacctggaccaggcatctggtggggccgtgctccagctgcggcccaacgaccaggtctgggtgcagatgccgtcggaccaggccaacggcctctactccacggagtacatccactcctccttttcaggattcttgctctgccccacataa

SEQ ID NO: 130 - protein, 717 aa, Homo sapiens
MTFSVLLCSTSTDAMLGTLTPLSSLLLLLLVLVLGCGPRASSGGGAGGAAGYAPVKYIQPMQKGPVGPPFREGKGQYLEMPLPLLPMDLKGEPGPPGKPGPRGPPGPPGFPGKPGMGKPGLHGQPGPAGPPGFSRMGKAGPPGLPGKVGPPGQPGLRGEPGIRGDQGLRGPPGPPGLPGPSGITIPGKPGAQGVPGPPGFQGEPGPQGEPGPPGDRGLKGDNGVGQPGLPGAPGQGGAPGPPGLPGPAGLGKPGLDGLPGAPGDKGESGPPGVPGPRGEPGAVGPKGPPGVDGVGVPGAAGLPGPQGPSGAKGEPGTRGPPGLIGPTGYGMPGLPGPKGDRGPAGVPGLLGDRGEPGEDGEPGEQGPQGLGGPPGLPGSAGLPGRRGPPGPKGEAGPGGPPGVPGIRGDQGPSGLAGKPGVPGERGLPGAHGPPGPTGPKGEPGFTGRPGGPGVAGALGQKGDLGLPGQPGLRGPSGIPGLQGPAGPIGPQGLPGLKGEPGLPGPPGEGRAGEPGTAGPTGPPGVPGSPGITGPPGPPGPPGPPGAPGAFDETGIAGLHLPNGGVEGAVLGKGGKPQFGLGELSAHATPAFTAVLTSPFPASGMPVKFDRTLYNGHSGYNPATGIFTCPVGGVYYFAYHVHVKGTNVWVALYKNNVPATYTYDEYKKGYLDQASGGAVLQLRPNDQVWVQMPSDQANGLYSTEYIHSSFSGFLLCPT

SEQ ID NO: 131 - DNA, 2112 bp, Homo sapiens
  CDS (1)...(2112)
atgctggggactctgacacccctgtcttcgctgctgctgctgctactggtgctggtgctggggtgtgggccgcgggcgtcctctggtggcggggccggtggggcggcgggctatgccccagtgaagtacatccagcccatgcagaaaggacctgtgggaccgcccttccgtgagggcaaaggccagtacctggaaatgcctctaccgctgctgccgatggacctgaagggagagcccggcccccctgggaagcccgggcctcggggtccccctggcccccctggcttcccaggaaaaccaggcatgggaaagccaggactccatgggcagcctggccctgctgggccccctggcttctcccggatgggcaaggctggtcccccagggctccctggcaaggtcgggccaccagggcagccggggcttcggggggagccaggaatacgaggggaccagggcctccggggacccccaggaccccctggcctcccgggcccctcaggcattactatccctggaaaaccaggtgcccaaggggtgccagggcccccaggattccagggggaaccagggccccagggggagcctgggcccccaggtgatcgaggcctcaagggggataatggagtgggccagcccgggctgcctggggccccagggcaggggggtgcccccggcccccccggcctccctggtccagctggcttaggcaaacctggtttggatgggcttcctggggccccaggagacaagggtgagtctgggcctcctggagttccaggccccaggggggagccaggagctgtgggcccaaaaggacctcctggagtagacggtgtgggagtcccaggggcagcagggttgccaggaccacagggcccatcaggggccaaaggggagccagggacccggggcccccctgggctgataggccccactggctatgggatgccaggactgccaggccccaagggggacaggggcccagctggggtcccaggactcttgggggacaggggtgagccaggggaggatggggagccaggggagcagggcccacagggtcttgggggtccccctggacttcctgggtctgcagggcttcctggcagacgtgggccccctgggcctaagggtgaggcagggcctggaggacccccaggagtgcctggcattcgaggtgaccaggggcctagtggcctggctgggaaaccaggggtcccaggtgagaggggacttcctggggcccatggaccccctggaccaactgggcccaagggtgagccgggtttcacgggtcgccctggaggaccaggggtggcaggagccctggggcagaaaggtgacttggggctccctgggcagcctggcctgaggggtccctcaggaatcccaggactccagggtccagctggccctattgggccccaaggcctgccgggcctgaagggggaaccaggcctgccagggccccctggagaggggagagcaggggaacctggcacggctgggcccacggggcccccaggggtccctggctcccctggaatcacgggccctccggggcctcccgggcccccgggaccccctggtgcccctggggccttcgatgagactggcatcgcaggcttgcacctgcccaacggcggtgtggagggtgccgtgctgggcaaggggggcaagccacagtttgggctgggcgagctgtctgcccatgccacaccggccttcactgcggtgctcacctcgcccttccccgcctcgggcatgcccgtgaaatttgaccggactctctacaatggccacagcggctacaacccagccactggcatcttcacctgccctgtgggcggcgtctactactttgcttaccatgtgcacgtcaagggcaccaacgtgtgggtggccctgtacaagaacaacgtgccggccacctatacctacgatgagtacaagaagggctacctggaccaggcatctggtggggccgtgctccagctgcggcccaacgaccaggtctgggtgcagatgccgtcggaccaggccaacggcctctactccacggagtacatccactcctccttttcaggattcttgctctgccccacataa

SEQ ID NO: 132 - protein, 703 aa, Homo sapiens
MLGTLTPLSSLLLLLLVLVLGCGPRASSGGGAGGAAGYAPVKYIQPMQKGPVGPPFREGKGQYLEMPLPLLPMDLKGEPGPPGKPGPRGPPGPPGFPGKPGMGKPGLHGQPGPAGPPGFSRMGKAGPPGLPGKVGPPGQPGLRGEPGIRGDQGLRGPPGPPGLPGPSGITIPGKPGAQGVPGPPGFQGEPGPQGEPGPPGDRGLKGDNGVGQPGLPGAPGQGGAPGPPGLPGPAGLGKPGLDGLPGAPGDKGESGPPGVPGPRGEPGAVGPKGPPGVDGVGVPGAAGLPGPQGPSGAKGEPGTRGPPGLIGPTGYGMPGLPGPKGDRGPAGVPGLLGDRGEPGEDGEPGEQGPQGLGGPPGLPGSAGLPGRRGPPGPKGEAGPGGPPGVPGIRGDQGPSGLAGKPGVPGERGLPGAHGPPGPTGPKGEPGFTGRPGGPGVAGALGQKGDLGLPGQPGLRGPSGIPGLQGPAGPIGPQGLPGLKGEPGLPGPPGEGRAGEPGTAGPTGPPGVPGSPGITGPPGPPGPPGPPGAPGAFDETGIAGLHLPNGGVEGAVLGKGGKPQFGLGELSAHATPAFTAVLTSPFPASGMPVKFDRTLYNGHSGYNPATGIFTCPVGGVYYFAYHVHVKGTNVWVALYKNNVPATYTYDEYKKGYLDQASGGAVLQLRPNDQVWVQMPSDQANGLYSTEYIHSSFSGFLLCPT

SEQ ID NO: 133 - DNA, 2058 bp, Homo sapiens
  CDS (1)...(2058)
atgctctggttctccggcgtcggggctctggctgagcgttactgccgccgctcgcctgggattacgtgctgcgtcttgctgctactcaattgctcgggggtccccatgtctctggcttcctccttcttgacaggttctgttgcaaaatgtgaaaatgaaggtgaagtcctccagattccatttatcacagacaacccttgcataatgtgtgtctgcttgaacaaggaagtgacatgtaagagagagaagtgccccgtgctgtcccgagactgtgccctggccatcaagcagaggggagcctgttgtgaacagtgcaaaggttgcacctatgaaggaaatacctataacagctccttcaaatggcagagcccggctgagccttgtgttctacgccagtgccaggagggtgttgtcacagagtctggggtgcgctgtgttgttcattgtaaaaaccctttggagcatctgggaatgtgctgccccacatgtccaggctgtgtgtttgagggtgtgcagtatcaagaaggggaggaatttcagccagaaggaagcaaatgtaccaagtgttcctgcactggaggcaggacacaatgtgtgagagaagtctgtcccattctctcctgtccccagcaccttagtcacatacccccaggacagtgctgccccaaatgtttgggtcagaggaaagtgtttgacctcccttttgggagctgcctctttcgaagtgatgtttatgacaatggatcctcatttctgtacgataactgcacagcttgtacctgcagggactctactgtggtttgcaagaggaagtgctcccaccctggtggctgtgaccaaggccaggagggctgttgtgaagagtgcctcctacgagtgcccccagaagacatcaaagtatgcaaatttggcaacaagattttccaggatggagagatgtggtcctctatcaattgtaccatctgtgcttgtgtgaaaggcaggacggagtgtcgcaataagcagtgcattcccatcagtagctgcccacagggcaaaattctcaacagaaaaggatgctgtcctatttgcactgaaaagcccggcgtttgcacggtgtttggagatccccactacaacacttttgacggtcggacatttaactttcaggggacgtgtcagtacgttttgacaaaagactgctcctcccctgcctcgcccttccaggtgctggtgaagaacgacgcccgccggacacgctccttctcgtggaccaagtcggtggagctggtgctgggcgagagcagggtcagcctgcagcagcacctcaccgtgcgctggaacggctcgcgcatcgcgctcccctgccgcgcgccacacttccacatcgacctggatggctacctcttgaaagtgaccaccaaagcaggtttggaaatatcttgggatggagacagttttgtagaagtcatggctgcgcctcatctcaagggcaagctctgtggtctttgtggcaactacaatggacataaacgtgatgacttaattggtggagatggaaacttcaagtttgatgtggatgactttgctgaatcttggagggtggagtccaatgagttctgcaacagacctcagagaaagccagtgcctgaactgtgtcaagggacagtcaaggtaaagctccgggcccatcgagaatgccaaaagctcaaatcctgggagtttcagacctgccactcgactgtggactacgccactttctaccggtcctgtgtgacagacatgtgtgaatgtccagtccataaaaactgttattgcgagtcatttttggcatatacccgggcctgccagagagagggcatcaaagtccactgggagcctcagcagaattgtgcagccacccagtgtaagcatggtgctgtgtacgatacctgtggtccgggatgtatcaagacctgtgacaactggaatgaaattggtccatgcaacaagccgtgcgttgctgggtgccactgtccagcaaacttggtccttcacaagggaaggtgcatcaagccagtcctttgtccccagcggtga

SEQ ID NO: 134 - protein, 685 aa, Homo sapiens
MLWFSGVGALAERYCRRSPGITCCVLLLLNCSGVPMSLASSFLTGSVAKCENEGEVLQIPFITDNPCIMCVCLNKEVTCKREKCPVLSRDCALAIKQRGACCEQCKGCTYEGNTYNSSFKWQSPAEPCVLRQCQEGVVTESGVRCVVHCKNPLEHLGMCCPTCPGCVFEGVQYQEGEEFQPEGSKCTKCSCTGGRTQCVREVCPILSCPQHLSHIPPGQCCPKCLGQRKVFDLPFGSCLFRSDVYDNGSSFLYDNCTACTCRDSTVVCKRKCSHPGGCDQGQEGCCEECLLRVPPEDIKVCKFGNKIFQDGEMWSSINCTICACVKGRTECRNKQCIPISSCPQGKILNRKGCCPICTEKPGVCTVFGDPHYNTFDGRTFNFQGTCQYVLTKDCSSPASPFQVLVKNDARRTRSFSWTKSVELVLGESRVSLQQHLTVRWNGSRIALPCRAPHFHIDLDGYLLKVTTKAGLEISWDGDSFVEVMAAPHLKGKLCGLCGNYNGHKRDDLIGGDGNFKFDVDDFAESWRVESNEFCNRPQRKPVPELCQGTVKVKLRAHRECQKLKSWEFQTCHSTVDYATFYRSCVTDMCECPVHKNCYCESFLAYTRACQREGIKVHWEPQQNCAATQCKHGAVYDTCGPGCIKTCDNWNEIGPCNKPCVAGCHCPANLVLHKGRCIKPVLCPQR

SEQ ID NO: 135 - DNA, 1884 bp, Homo sapiens
  CDS (1)...(1884)
atgctctggttctccggcgtcggggctctggctgagcgttactgccgccgctcgcctgggattacgtgctgcgtcttgctgctactcaattgctcgggggtccccatgtctctggcttcctccttcttgacaggttctgttgcaaaatgtgaaaatgaaggtgaagtcctccagattccatttatcacagacaacccttgcataatgtgtgtctgcttgaacaaggaagtgacatgtaagagagagaagtgccccgtgctgtcccgagactgtgccctggccatcaagcagaggggagcctgttgtgaacagtgcaaaggttgcacctatgaaggaaatacctataacagctccttcaaatggcagagcccggctgagccttgtgttctacgccagtgccaggagggtgttgtcacagagtctggggtgcgctgtgttgttcattgtaaaaaccctttggagcatctgggaatgtgctgccccacatgtccaggctgtgtgtttgagggtgtgcagtatcaagaaggggaggaatttcagccagaaggaagcaaatgtaccaagtgttcctgcactggaggcaggacacaatgtgtgagagaagtctgtcccattctctcctgtccccagcaccttagtcacatacccccaggacagtgctgccccaaatgtttgggtcagaggaaagtgtttgacctcccttttgggagctgcctctttcgaagtgatgtttatgacaatggatcctcatttctgtacgataactgcacagcttgtacctgcagggactctactgtggtttgcaagaggaagtgctcccaccctggtggctgtgaccaaggccaggagggctgttgtgaagagtgcctcctacgagtgcccccagaagacatcaaagtatgcaaatttggcaacaagattttccaggatggagagatgtggtcctctatcaattgtaccatctgtgcttgtgtgaaaggcaggacggagtgtcgcaataagcagtgcattcccatcagtagctgcccacaggtgctggtgaagaacgacgcccgccggacacgctccttctcgtggaccaagtcggtggagctggtgctgggcgagagcagggtcagcctgcagcagcacctcaccgtgcgctggaacggctcgcgcatcgcgctcccctgccgcgcgccacacttccacatcgacctggatggctacctcttgaaagtgaccaccaaagcaggtttggaaatatcttgggatggagacagttttgtagaagtcatggctgcgcctcatctcaagggcaagctctgtggtctttgtggcaactacaatggacataaacgtgatgacttaattggtggagatggaaacttcaagtttgatgtggatgactttgctgaatcttggagggtggagtccaatgagttctgcaacagacctcagagaaagccagtgcctgaactgtgtcaagggacagtcaaggtaaagctccgggcccatcgagaatgccaaaagctcaaatcctgggagtttcagacctgccactcgactgtggactacgccactttctaccggtcctgtgtgacagacatgtgtgaatgtccagtccataaaaactgttattgcgagtcatttttggcatatacccgggcctgccagagagagggcatcaaagtccactgggagcctcagcagaattgtgcagccacccagtgtaagcatggtgctgtgtacgatacctgtggtccgggatgtatcaagacctgtgacaactggaatgaaattggtccatgcaacaagccgtgcgttgctgggtgccactgtccagcaaacttggtccttcacaagggaaggtgcatcaagccagtcctttgtccccagcggtga

SEQ ID NO: 136 - protein, 627 aa, Homo sapiens
MLWFSGVGALAERYCRRSPGITCCVLLLLNCSGVPMSLASSFLTGSVAKCENEGEVLQIPFITDNPCIMCVCLNKEVTCKREKCPVLSRDCALAIKQRGACCEQCKGCTYEGNTYNSSFKWQSPAEPCVLRQCQEGVVTESGVRCVVHCKNPLEHLGMCCPTCPGCVFEGVQYQEGEEFQPEGSKCTKCSCTGGRTQCVREVCPILSCPQHLSHIPPGQCCPKCLGQRKVFDLPFGSCLFRSDVYDNGSSFLYDNCTACTCRDSTVVCKRKCSHPGGCDQGQEGCCEECLLRVPPEDIKVCKFGNKIFQDGEMWSSINCTICACVKGRTECRNKQCIPISSCPQVLVKNDARRTRSFSWTKSVELVLGESRVSLQQHLTVRWNGSRIALPCRAPHFHIDLDGYLLKVTTKAGLEISWDGDSFVEVMAAPHLKGKLCGLCGNYNGHKRDDLIGGDGNFKFDVDDFAESWRVESNEFCNRPQRKPVPELCQGTVKVKLRAHRECQKLKSWEFQTCHSTVDYATFYRSCVTDMCECPVHKNCYCESFLAYTRACQREGIKVHWEPQQNCAATQCKHGAVYDTCGPGCIKTCDNWNEIGPCNKPCVAGCHCPANLVLHKGRCIKPVLCPQR

1. An isolated nucleic acid molecule that encodes the amino acid sequence of SEQ ID NO:2, 5, 7, 9, 11, 14, 16, 18, 20, 22, 24, 27, 29, 32, 34, 36, 38, 40, 42, 44, 46, 48, 51, 54, 56, 59, 61, 63, 65, 68, 70, 73, 75, 77, 80, 82, 85, 88, 91, 93, 95, 97, 99, 101, 103, 105, 107, 109, 111, 113, 115, 117, 119, 121, 123, 125, 127, 130, 132, 134, or 136.

2. The isolated nucleic acid molecule of claim 1, wherein said nucleic acid molecule comprises the nucleotide sequence of SEQ ID NO:1, 4, 6, 8, 10, 13, 15, 17, 19, 21, 23, 26, 28, 31, 33, 35, 37, 39, 41, 43, 45, 47, 50, 53, 55, 58, 60, 62, 64, 67, 69, 72, 74, 76, 79, 81, 84, 87, 90, 92, 94, 96, 98, 100, 102, 104, 106, 108, 110, 112, 114, 116, 118, 120, 122, 124, 126, 129, 131, 133, or 135.

3. An expression vector comprising the isolated nucleic acid molecule of claim 1.

4. An isolated polypeptide comprising the amino acid sequence of SEQ ID NO:2, 5, 7, 9, 11, 14, 16, 18, 20, 22, 24, 27, 29, 32, 34, 36, 38, 40, 42, 44, 46, 48, 51, 54, 56, 59, 61, 63, 65, 68, 70, 73, 75, 77, 80, 82, 85, 88, 91, 93, 95, 97, 99, 101, 103, 105, 107, 109, 111, 113, 115, 117, 119, 121, 123, 125, 127, 130, 132, 134, or 136.

5. An antibody that selectively binds a polypeptide drawn from the group consisting of: SEQ ID NO: 2, 5, 7, 9, 11, 14, 16, 18, 20, 22, 24, 27, 29, 32, 34, 36, 38, 40, 42, 44, 46, 48, 51, 54, 56, 59, 61, 63, 65, 68, 70, 73, 75, 77, 80, 82, 85, 88, 91, 93, 95, 97, 99, 101, 103, 105, 107, 109, 111, 113, 115, 117, 19, 121, 123, 125, 127, 130, 132, 134, and 136.

6. An oligonucleotide that inhibits the expression of a nucleic acid molecule that encodes an amino acid sequence drawn from the group consisting of: SEQ ID NO: 2, 5, 7, 9, 11, 14, 16, 18, 20, 22, 24, 27, 29, 32, 34, 36, 38, 40, 42, 44, 46, 48, 51, 54, 56, 59, 61, 63, 65, 68, 70, 73, 75, 77, 80, 82, 85, 88, 91, 93, 95, 97, 99, 101, 103, 105, 107, 109, 111, 113, 115, 117, 119, 121, 123, 125, 127, 130, 132, 134, and 136.
